(19) United States
(12) Patent Application Publication
(10) Pub. No.: US 2026/0193654 A1
(43) Pub. Date: Jul. 9, 2026

(54) COMPOSITIONS AND METHODS FOR REGULATING MAPT

(71) Applicant: VOYAGER THERAPEUTICS, INC., Lexington, MA (US)

(72) Inventors: Dinah Wen-Yee Sah, Hopkinton, MA (US); Kathrin Hultsch, Kulmbach (DE); Jochen Deckert, Bayreuth (DE); Wen Jin, Arlington, MA (US); Jinzhao Hou, Lexington, MA (US); Wencheng Liu, Cambridge, MA (US); Todd Carter, Winchester, MA (US); Cansu Colpan, North Billerica, MA (US); Elisabeth Knoll, Melrose, MA (US); Shiron Jessie Lee, Medford, MA (US); Rajeev Nambiar Sivasankaran, Acton, MA (US); Hechen Bao, Waltham, MA (US)

(21) Appl. No.: 19/135,319

(22) PCT Filed: Dec. 28, 2023
(86) PCT No.: PCT/US2023/086232

§ 371 Date: Jun. 3, 2025

Related U.S. Application Data
(60) Provisional application No. 63/477,736, filed on Dec. 29, 2022.

(51) Int. Cl. C12N 15/113; A61P 25/28; C12N 15/86

(52) U.S. Cl. CPC C12N 15/113; A61P 25/28; C12N 15/86; C12N 2310/14; C12N 2750/14143; C12N 2750/14151

(57) ABSTRACT

The disclosure relates to small interfering RNA (siRNA) molecules targeting MAPT and adeno-associated viral (AAV) particles encoding the same for treating tauopathies.

### RELATED APPLICATIONS

[0001] The application claims priority to U.S. Provisional Application No. 63/477,736 filed on Dec. 29, 2022; the entire contents of which are hereby incorporated by reference in their entirety.

### SEQUENCE LISTING

[0002] The present application is being filed along with a Sequence Listing in electronic format. The Sequence Listing file, entitled V2071-3010PCT_SL.xml, was created on Dec. 13, 2023 and is 2,478,152 bytes in size. The information in electronic format of the Sequence Listing is incorporated herein by reference in its entirety.

### FIELD OF THE DISCLOSURE

[0003] The present disclosure relates generally to compositions and methods for vectorized delivery of an agent, e.g., an RNA agent, that that inhibits a mutant, variant, or wild type human microtubule-associated protein tau (MAPT) gene, mRNA, and/or protein.

### BACKGROUND

[0004] Tauopathies, which may also be referred to herein as tau-associated diseases, are a heterogeneous group of neurodegenerative diseases characterized by the dysfunction and/or aggregation of the microtubule-associated protein tau (MAPT) which may also be referred to as Tau herein, which is encoded by the MAPT gene. Tau is normally a very soluble protein known to associate with microtubules based on the extent of its phosphorylation. In tauopathies, tau becomes hyperphosphorylated, misfolds and aggregates as neurofibrillary tangles (NFT) of paired helical filaments (PHF), twisted ribbons or straight filaments. These NFT are largely considered indicative of impending neuronal cell degeneration which can contribute to widespread neuronal cell loss, leading to a variety of behavioral and cognitive deficits, and can also be fatal. Currently, very limited treatment options are available for tauopathies, often with only symptomatic relief and supportive therapies available. As such, there is a medical need for improved compositions and methods of prevention, treatment, and diagnosis for diseases associated with aberrant tau expression, including tauopathies and related neurodegenerative disorders.

### SUMMARY

[0005] The present disclosure provides AAV particles encoding an agent for targeting MAPT, e.g., an RNA agent to modulate, e.g., inhibit, MAPT gene expression and/or MAPT protein production and methods of use thereof. In some embodiments, the agent for targeting MAPT, e.g., a MAPT gene, mRNA, or protein (e.g., a tau protein) is an RNA agent for targeting MAPT, e.g., a siRNA duplex for targeting MAPT. In some embodiments, the agent for targeting MAPT comprises a modulatory polynucleotide encoding a siRNA duplex for targeting MAPT. Methods for treating diseases associated MAPT expression, e.g., aberrant expression, such as tauopathies, including but not limited to Alzheimer's disease (AD), frontotemporal dementia (FTD), and/or Dravet syndrome (DS) in a subject in need thereof.

[0006] Accordingly, in one aspect, the present disclosure provides a short interfering ribonucleic acid (siRNA) for inhibiting expression of microtubule-associated protein tau (MAPT) which comprises a sense strand sequence and an antisense strand sequence, wherein the antisense sequence is complementary to at least 15, 16, 17, 18, 19, 20, or 21 contiguous nucleotides comprising 0, 1, 2, or 3 mismatches of a MAPT sequence comprising the nucleotide sequence of SEQ ID NO: 5024 or a nucleotide sequence provided in Table 3 or 19. In some embodiments, the antisense strand sequence comprises at least 15, 16, 17, 18, 19, 20, 21 contiguous nucleotides differing by 3, 2, 1, or 0 nucleotides from any one of the antisense strand sequences provided in Tables 3 4, 5, 9A, or 9B; and the sense strand sequence comprises at least 15, 16, 17, 18, 19, 20, 21 contiguous nucleotides differing by 3, 2, 1, or 0 nucleotides from any one of the sense strand sequences provided in Tables 3 4, 5, 9A, or 9B, wherein the sense strand sequence and the antisense strand sequence comprise a region of complementarity of at least 15 nucleotides. In some embodiments, the antisense strand sequence comprises at least 15, 16, 17, 18, 19, 20, 21 contiguous nucleotides from any one of the antisense strand sequences provided in Tables 3 4, 5, 9A, or 9B; and the sense strand sequence comprises at least 15, 16, 17, 18, 19, 20, 21 contiguous nucleotides from any one of the sense strand sequences provided in Tables 3 4, 5, 9A, or 9B, wherein the sense strand sequence and the antisense strand sequence comprise a region of complementarity of at least 15 nucleotides. In some embodiments, the antisense strand sequence comprises nucleotide sequence of any one of the antisense strand sequences provided in Tables 3 4, 5, 9A, or 9B; and the sense strand sequence comprises the nucleotide sequence of any one of the sense strand sequences provided in Tables 3 4, 5, 9A, or 9B, wherein the sense strand sequence and the antisense strand sequence comprise a region of complementarity of at least 15 nucleotides.

[0007] In yet another aspect, the present disclosure provides a short interfering ribonucleic acid (siRNA) for inhibiting expression of microtubule-associated protein tau (MAPT) which comprises a sense strand sequence and an antisense strand sequence, wherein: (i) the antisense strand sequence comprises at least 20 or 21 contiguous nucleotides of any one of SEQ ID NOs: 4908, 4920, 4924, 5057, 4916, 4912, 5080, 5104, or 5128; and (ii) the sense strand sequence comprises at least 20 or 21 contiguous nucleotides of any one of SEQ ID NOs: 4906, 4926, 4946, 4966, 4986, 5006, 4918, 4938, 4958, 4978, 4998, 4922, 4942, 4962, 4982, 5002, 5022, 5054, 5060, 5064, 5066, 5070, 5074, 4914, 4934, 4954, 4974, 4994, 5014, 4910, 4930, 4950, 4970, 4990, 5010, 5077, 5084, 5088, 5092, 5096, 5098, 5101, 5108, 5112, 5116, 5120, 5122, 5125, 5132, 5136, 5140, 5144, or 5146; wherein the sense strand sequence and the antisense strand sequence comprise a region of complementarity of at least 15 nucleotides.

[0008] In yet another aspect, the present disclosure provides an adeno-associated virus (AAV) viral genome comprising a nucleotide sequence positioned between two inverted terminal repeats (ITRs), wherein the nucleotide sequence encodes an siRNA for inhibiting MAPT, wherein the siRNA comprises a sense strand sequence and an antisense strand sequence, wherein: (i) the antisense strand sequence comprises at least 19, 20, or 21 contiguous nucleotides of any one of SEQ ID NOs: 4908, 4920, 4924, 5057, 4916, 4912, 5080, 5104, or 5128; and (ii) the sense strand sequence comprises at least 19, 20, or 21 contiguous nucleotides of any one of SEQ ID NOs: 4906, 4926, 4946, 4966, 4986, 5006, 4918, 4938, 4958, 4978, 4998, 4922, 4942, 4962, 4982, 5002, 5022, 5054, 5060, 5064, 5066, 5070, 5074, 4914, 4934, 4954, 4974, 4994, 5014, 4910, 4930, 4950, 4970, 4990, 5010, 5077, 5084, 5088, 5092, 5096, 5098, 5101, 5108, 5112, 5116, 5120, 5122, 5125, 5132, 5136, 5140, 5144, or 5146; wherein the sense strand sequence and the antisense strand sequence comprise a region of complementarity of at least 15 nucleotides.

[0009] In another aspect, the present disclosure provides a modulatory polynucleotide encoding an siRNA for targeting MAPT described herein. In some embodiments, the modulatory polynucleotide further comprises a 5′ flanking region, a loop region, and/or a 3′ flanking region.

[0010] In another aspect, the present disclosure provides an AAV particle comprising a promoter operably linked a nucleic acid encoding a modulatory polynucleotide comprising an siRNA for targeting MAPT described herein.

[0011] In another aspect, the present disclosure provides a method of making an AAV particle comprising an AAV capsid protein, e.g., an AAV capsid variant, encoding an siRNA for targeting MAPT described herein. In some embodiments, the method comprises providing a host cell comprising a viral genome encoding an siRNA described herein and incubating the host cell under conditions suitable to enclose the viral genome in the AAV capsid protein, e.g., an AAV capsid variant, thereby making the AAV particle.

[0012] In yet another aspect, the present disclosure provides a method of delivering an siRNA for inhibiting MAPT to a cell. In some embodiments, the method comprises administering an effective amount of an siRNA or an AAV particle encoding an siRNA described herein.

[0013] In yet another aspect, the present disclosure provides, a method of treating a subject having or diagnosed with having a genetic disorder e.g., a monogenic disorder or a polygenic disorder. The method comprising administering an effective amount of an siRNA or an AAV particle encoding an siRNA described herein.

[0014] In yet another aspect, the present disclosure provides, a method of treating a subject having or diagnosed with having a neurological disorder e.g., a neurodegenerative disorder. The method comprising administering an effective amount of an siRNA or an AAV particle encoding an siRNA described herein.

[0015] In yet another aspect, the present disclosure provides, a method of treating a subject having or diagnosed with having a disorder associated with tau expression, e.g., aberrant tau expression. The method comprising administering an effective amount of an siRNA or an AAV particle encoding an siRNA described herein.

[0016] In yet another aspect, the present disclosure provides, a method of treating a subject having or diagnosed with a tauopathy. The method comprising administering an effective amount of an siRNA or an AAV particle encoding an siRNA described herein.

[0017] In some embodiments, the genetic disorder, neurological disorder (e.g., neurodegenerative disorder), disorder associated with tau expression (e.g., aberrant tau expression), and/or tauopathy is Alzheimer's disease, Frontotemporal dementia (FTD), frontotemporal dementia and parkinsonism linked to chromosome 17 (FTDP-17), frontotemporal lobar degeneration (FTLD), Dravet syndrome, neurodegenerative disease, traumatic brain injury (TBI), chronic traumatic encephalopathy (CTE), progressive supranuclear palsy (PSP), Down's syndrome, Pick's disease, corticobasal degeneration (CBD), corticobasal syndrome, amyotrophic lateral sclerosis (ALS), Prion diseases, CJD, Multiple system atrophy, mild cognitive impairment, Tangle-only dementia, or Progressive subcortical gliosis.

### ENUMERATED EMBODIMENTS

1. A short interfering ribonucleic acid (siRNA) for inhibiting expression of microtubule-associated protein tau (MAPT) which comprises a sense strand sequence and an antisense strand sequence, wherein the antisense sequence is complementary to at least 15, 16, 17, 18, 19, 20, or 21 contiguous nucleotides comprising 0, 1, 2, or 3 mismatches of a MAPT sequence comprising the nucleotide sequence of SEQ ID NO: 5024 or a nucleotide sequence provided in Table 3 or 19.
2. The siRNA of embodiment 1, wherein the antisense strand is complementary to at least 15, 16, 17, 18, 19, 20, or 21, contiguous nucleotides with 0, 1, 2, or 3 mismatches to an exon of a MAPT sequence, wherein the exon comprises nucleotides 1277 to 1332 of SEQ ID NO: 5024, nucleotides 1712-1977 of SEQ ID NO: 5024, or nucleotides 2266-6644 of SEQ ID NO: 5024.
3. The siRNA of embodiment 1 or 2, wherein the antisense strand is complementary to at least 15, 16, 17, or 18, contiguous nucleotides with 0, 1, 2, or 3 mismatches to nucleotides 1300-1317, 1305-1322, 1860-1877, 2279-2297, 2286-2303, 2402-2419, 2581-2958, 2584-2601, 2633-2650, or 2634-2653 of SEQ ID NO: 5024.
4. The siRNA of any one of embodiments 1-3, wherein the sense strand comprises:
[0018] (i) at least 15, 16, 17, 18, 19, 20, or 21 contiguous nucleotides comprising 0, 1, 2, or 3 mismatches of a MAPT sequence comprising the nucleotide sequence of SEQ ID NO: 5024 or a nucleotide sequence provided in Table 3 or 19;
[0019] (ii) at least 15, 16, 17, 18, 19, 20, or 21, contiguous nucleotides with 0, 1, 2, or 3 mismatches to an exon of a MAPT sequence, wherein the exon comprises nucleotides 1277 to 1332 of SEQ ID NO: 5024, nucleotides 1712-1977 of SEQ ID NO: 5024, or nucleotides 2266-6644 of SEQ ID NO: 5024; or
[0020] (iii) at least 15, 16, 17, or 18, contiguous nucleotides with 0, 1, 2, or 3 mismatches to nucleotides 1300-1317, 1305-1322, 1860-1877, 2279-2297, 2286-2303, 2402-2419, 2581-2958, 2584-2601, 2633-2650, or 2634-2653 of SEQ ID NO: 5024.
   5. The siRNA of any one of embodiments 1-4, wherein the antisense strand sequence comprises at least 15, 16, 17, 18, 19, 20, 21 contiguous nucleotides differing by 3, 2, 1, or 0 nucleotides from any one of the antisense strand sequences provided in Tables 3 4, 5, 9A, or 9B.
   6. The siRNA of any one of embodiments 1-5, wherein the sense strand sequence comprises at least 15, 16, 17, 18, 19, 20, 21 contiguous nucleotides differing by 3, 2, 1, or 0 nucleotides from any one of the sense strand sequences provided in Table 4, 5, 9A, or 9B.
   7. The siRNA of any one of embodiments 1-6, wherein the antisense strand sequence comprises at least 15, 16, 17, 18, 19, 20, 21 contiguous nucleotides differing by 3, 2, 1, or 0 nucleotides from any one of the antisense strand sequences provided in Tables 3 4, 5, 9A, or 9B; and the sense strand sequence comprises at least 15, 16, 17, 18, 19, 20, 21 contiguous nucleotides differing by 3, 2, 1, or 0 nucleotides from any one of the sense strand sequences provided in Tables 3 4, 5, 9A, or 9B, wherein the sense strand sequence and the antisense strand sequence comprise a region of complementarity of at least 15 nucleotides.
   8. The siRNA of embodiment 7, wherein the region of complementarity is 15-30, 19-21, or 25-30 nucleotides in length, e.g., 17, 18, 20, 21, 22, 25, or 30 nucleotides in length.
   9. The siRNA of any one of embodiments 1-8, wherein:
[0021] (i) the antisense strand sequence comprises at least 15, 16, 17, 18, or 19 contiguous nucleotides differing by 3, 2, 1, or 0 nucleotides from the nucleotide sequence of SEQ ID NO: 4700 and the sense strand sequence comprises at least 15, 16, 17, 18, or 19 contiguous nucleotides differing by 3, 2, 1, or 0 nucleotides from the nucleotide sequence of any one of SEQ ID NOs: 4502-4505;
[0022] (ii) the antisense strand sequence comprises at least 15, 16, 17, 18, 19, 20, or 21 contiguous nucleotides differing by 3, 2, 1, or 0 nucleotides from the nucleotide sequence of SEQ ID NO: 4920 and the sense strand sequence comprises at least 15, 16, 17, 18, 19, 20, or 21 contiguous nucleotides differing by 3, 2, 1, or 0 nucleotides from the nucleotide sequence of any one of SEQ ID NOs: 4918, 4938, 4958, 4978, or 4998;
[0023] (iii) the antisense strand sequence comprises at least 15, 16, 17, 18, or 19 contiguous nucleotides differing by 3, 2, 1, or 0 nucleotides from the nucleotide sequence of SEQ ID NO: 4697 and the sense strand sequence comprises at least 15, 16, 17, 18, or 19 contiguous nucleotides differing by 3, 2, 1, or 0 nucleotides from the nucleotide sequence of any one of SEQ ID NOs: 4495-4499;
[0024] (iv) the antisense strand sequence comprises at least 15, 16, 17, 18, 19, 20, or 21 contiguous nucleotides differing by 3, 2, 1, or 0 nucleotides from the nucleotide sequence of SEQ ID NO: 4908 and the sense strand sequence comprises at least 15, 16, 17, 18, 19, 20, or 21 contiguous nucleotides differing by 3, 2, 1, or 0 nucleotides from the nucleotide sequence of any one of SEQ ID NOs: 4906, 4926, 4946, 4966, 4986, or 5006;
[0025] (v) the antisense strand sequence comprises at least 15, 16, 17, 18, or 19 contiguous nucleotides differing by 3, 2, 1, or 0 nucleotides from the nucleotide sequence of SEQ ID NO: 4690 and the sense strand sequence comprises at least 15, 16, 17, 18, or 19 contiguous nucleotides differing by 3, 2, 1, or 0 nucleotides from the nucleotide sequence of any one of SEQ ID NOs: 4480-4484;
[0026] (vi) the antisense strand sequence comprises at least 15, 16, 17, 18, 19, 20, or 21 contiguous nucleotides differing by 3, 2, 1, or 0 nucleotides from the nucleotide sequence of SEQ ID NO: 4924 and the sense strand sequence comprises at least 15, 16, 17, 18, 19, 20, or 21 contiguous nucleotides differing by 3, 2, 1, or 0 nucleotides from the nucleotide sequence of any one of SEQ ID NOs: 4922, 4942, 4962, 4982, 5002, or 5022;
[0027] (vii) the antisense strand sequence comprises at least 15, 16, 17, 18, or 19 contiguous nucleotides differing by 3, 2, 1, or 0 nucleotides from the nucleotide sequence of SEQ ID NO: 4694 and the sense strand sequence comprises at least 15, 16, 17, 18, or 19 contiguous nucleotides differing by 3, 2, 1, or 0 nucleotides from the nucleotide sequence of SEQ ID NO: 4492;
[0028] (viii) the antisense strand sequence comprises at least 15, 16, 17, 18, or 19 contiguous nucleotides differing by 3, 2, 1, or 0 nucleotides from the nucleotide sequence of SEQ ID NO: 4691 and the sense strand sequence comprises at least 15, 16, 17, 18, or 19 contiguous nucleotides differing by 3, 2, 1, or 0 nucleotides from the nucleotide sequence of any one of SEQ ID NOs: 4485-4489;
[0029] (ix) the antisense strand sequence comprises at least 15, 16, 17, 18, 19, 20, or 21 contiguous nucleotides differing by 3, 2, 1, or 0 nucleotides from the nucleotide sequence of SEQ ID NO: 4916 and the sense strand sequence comprises at least 15, 16, 17, 18, 19, 20, or 21 contiguous nucleotides differing by 3, 2, 1, or 0 nucleotides from the nucleotide sequence of any one of SEQ ID NOs: 4914, 4934, 4954, 4974, 4994, or 5014;
[0030] (x) the antisense strand sequence comprises at least 15, 16, 17, 18, or 19 contiguous nucleotides differing by 3, 2, 1, or 0 nucleotides from the nucleotide sequence of SEQ ID NO: 4701 and the sense strand sequence comprises at least 15, 16, 17, 18, or 19 contiguous nucleotides differing by 3, 2, 1, or 0 nucleotides from the nucleotide sequence of any one of SEQ ID NOs: 4506-4510;
[0031] (xi) the antisense strand sequence comprises at least 15, 16, 17, 18, 19, 20, or 21 contiguous nucleotides differing by 3, 2, 1, or 0 nucleotides from the nucleotide sequence of SEQ ID NO: 4912 and the sense strand sequence comprises at least 15, 16, 17, 18, 19, 20, or 21 contiguous nucleotides differing by 3, 2, 1, or 0 nucleotides from the nucleotide sequence of any one of SEQ ID NOs: 4910, 4930, 4950, 4970, 4990, or 5010;
[0032] (xii) the antisense strand sequence comprises at least 15, 16, 17, 18, or 19 contiguous nucleotides differing by 3, 2, 1, or 0 nucleotides from the nucleotide sequence of SEQ ID NO: 4687 and the sense strand sequence comprises at least 15, 16, 17, 18, or 19 contiguous nucleotides differing by 3, 2, 1, or 0 nucleotides from the nucleotide sequence of SEQ ID NO: 4477;
[0033] (xiii) the antisense strand sequence comprises at least 15, 16, 17, 18, or 19 contiguous nucleotides differing by 3, 2, 1, or 0 nucleotides from the nucleotide sequence of SEQ ID NO: 4712 and the sense strand sequence comprises at least 15, 16, 17, 18, or 19 contiguous nucleotides differing by 3, 2, 1, or 0 nucleotides from the nucleotide sequence of SEQ ID NO: 4521;
[0034] (xiv) the antisense strand sequence comprises at least 15, 16, 17, 18, or 19 contiguous nucleotides differing by 3, 2, 1, or 0 nucleotides from the nucleotide sequence of SEQ ID NO: 4696 and the sense strand sequence comprises at least 15, 16, 17, 18, or 19 contiguous nucleotides differing by 3, 2, 1, or 0 nucleotides from the nucleotide sequence of SEQ ID NO: 4494; or
[0035] (xv) the antisense strand sequence comprises at least 15, 16, 17, 18, or 19 contiguous nucleotides differing by 3, 2, 1, or 0 nucleotides from the nucleotide sequence of SEQ ID NO: 4718 and the sense strand sequence comprises at least 15, 16, 17, 18, or 19 contiguous nucleotides differing by 3, 2, 1, or 0 nucleotides from the nucleotide sequence of SEQ ID NO: 4527.
   10. The siRNA of any one of claims 1-9, wherein:
[0036] (i) the antisense strand sequence comprises at least 15, 16, 17, 18, or 19 contiguous nucleotides from the nucleotide sequence of SEQ ID NO: 4700 and the sense strand sequence comprises at least 15, 16, 17, 18, or 19 contiguous nucleotides from the nucleotide sequence of any one of SEQ ID NOs: 4502-4505;
[0037] (ii) the antisense strand sequence comprises at least 15, 16, 17, 18, 19, 20, or 21 contiguous nucleotides from the nucleotide sequence of SEQ ID NO: 4920 and the sense strand sequence comprises at least 15, 16, 17, 18, 19, 20, or 21 contiguous nucleotides differing from the nucleotide sequence of any one of SEQ ID NOs: 4918, 4938, 4958, 4978, or 4998;
[0038] (iii) the antisense strand sequence comprises at least 15, 16, 17, 18, or 19 contiguous nucleotides from the nucleotide sequence of SEQ ID NO: 4697 and the sense strand sequence comprises at least 15, 16, 17, 18, or 19 contiguous nucleotides from the nucleotide sequence of any one of SEQ ID NOs: 4495-4499;
[0039] (iv) the antisense strand sequence comprises at least 15, 16, 17, 18, 19, 20, or 21 contiguous nucleotides from the nucleotide sequence of SEQ ID NO: 4908 and the sense strand sequence comprises at least 15, 16, 17, 18, 19, 20, or 21 contiguous nucleotides from the nucleotide sequence of any one of SEQ ID NOs: 4906, 4926, 4946, 4966, 4986, or 5006;
[0040] (v) the antisense strand sequence comprises at least 15, 16, 17, 18, or 19 contiguous nucleotides from the nucleotide sequence of SEQ ID NO: 4690 and the sense strand sequence comprises at least 15, 16, 17, 18, or 19 contiguous nucleotides from the nucleotide sequence of any one of SEQ ID NOs: 4480-4484;
[0041] (vi) the antisense strand sequence comprises at least 15, 16, 17, 18, 19, 20, or 21 contiguous nucleotides from the nucleotide sequence of SEQ ID NO: 4924 and the sense strand sequence comprises at least 15, 16, 17, 18, 19, 20, or 21 contiguous nucleotides from the nucleotide sequence of any one of SEQ ID NOs: 4922, 4942, 4962, 4982, 5002, or 5022;
[0042] (vii) the antisense strand sequence comprises at least 15, 16, 17, 18, or 19 contiguous nucleotides from the nucleotide sequence of SEQ ID NO: 4694 and the sense strand sequence comprises at least 15, 16, 17, 18, or 19 contiguous nucleotides from the nucleotide sequence of SEQ ID NO: 4492; (viii) the antisense strand sequence comprises at least 15, 16, 17, 18, or 19 contiguous nucleotides from the nucleotide sequence of SEQ ID NO: 4691 and the sense strand sequence comprises at least 15, 16, 17, 18, or 19 contiguous nucleotides from the nucleotide sequence of any one of SEQ ID NOs: 4485-4489;
[0043] (ix) the antisense strand sequence comprises at least 15, 16, 17, 18, 19, 20, or 21 contiguous nucleotides from the nucleotide sequence of SEQ ID NO: 4916 and the sense strand sequence comprises at least 15, 16, 17, 18, 19, 20, or 21 contiguous nucleotides from the nucleotide sequence of any one of SEQ ID NOs: 4914, 4934, 4954, 4974, 4994, or 5014;
[0044] (x) the antisense strand sequence comprises at least 15, 16, 17, 18, or 19 contiguous nucleotides from the nucleotide sequence of SEQ ID NO: 4701 and the sense strand sequence comprises at least 15, 16, 17, 18, or 19 contiguous nucleotides from the nucleotide sequence of any one of SEQ ID NOs: 4506-4510;
[0045] (xi) the antisense strand sequence comprises at least 15, 16, 17, 18, 19, 20, or 21 contiguous nucleotides from the nucleotide sequence of SEQ ID NO: 4912 and the sense strand sequence comprises at least 15, 16, 17, 18, 19, 20, or 21 contiguous nucleotides from the nucleotide sequence of any one of SEQ ID NOs: 4910, 4930, 4950, 4970, 4990, or 5010;
[0046] (xii) the antisense strand sequence comprises at least 15, 16, 17, 18, or 19 contiguous nucleotides from the nucleotide sequence of SEQ ID NO: 4687 and the sense strand sequence comprises at least 15, 16, 17, 18, or 19 contiguous nucleotides from the nucleotide sequence of SEQ ID NO: 4477;
[0047] (xiii) the antisense strand sequence comprises at least 15, 16, 17, 18, or 19 contiguous nucleotides from the nucleotide sequence of SEQ ID NO: 4712 and the sense strand sequence comprises at least 15, 16, 17, 18, or 19 contiguous nucleotides from the nucleotide sequence of SEQ ID NO: 4521;
[0048] (xiv) the antisense strand sequence comprises at least 15, 16, 17, 18, or 19 contiguous nucleotides from the nucleotide sequence of SEQ ID NO: 4696 and the sense strand sequence comprises at least 15, 16, 17, 18, or 19 contiguous nucleotides from the nucleotide sequence of SEQ ID NO: 4494; or (xv) the antisense strand sequence comprises at least 15, 16, 17, 18, or 19 contiguous nucleotides from the nucleotide sequence of SEQ ID NO: 4718 and the sense strand sequence comprises at least 15, 16, 17, 18, or 19 contiguous nucleotides from the nucleotide sequence of SEQ ID NO: 4527.
   11. A short interfering ribonucleic acid (siRNA) for inhibiting expression of microtubule-associated protein tau (MAPT) which comprises a sense strand sequence and an antisense strand sequence, wherein:
[0049] (i) the antisense strand sequence comprises at least 20 or 21 contiguous nucleotides of any one of SEQ ID NOs: 4908, 4920, 4924, 5057, 4916, 4912, 5080, 5104, or 5128; and
[0050] (ii) the sense strand sequence comprises at least 20 or 21 contiguous nucleotides of any one of SEQ ID NOs: 4906, 4926, 4946, 4966, 4986, 5006, 4918, 4938, 4958, 4978, 4998, 4922, 4942, 4962, 4982, 5002, 5022, 5054, 5060, 5064, 5066, 5070, 5074, 4914, 4934, 4954, 4974, 4994, 5014, 4910, 4930, 4950, 4970, 4990, 5010, 5077, 5084, 5088, 5092, 5096, 5098, 5101, 5108, 5112, 5116, 5120, 5122, 5125, 5132, 5136, 5140, 5144, or 5146;
[0051] wherein the sense strand sequence and the antisense strand sequence comprise a region of complementarity of at least 15 nucleotides.
   12. An adeno-associated virus (AAV) viral genome comprising a nucleotide sequence positioned between two inverted terminal repeats (ITRs), wherein the nucleotide sequence encodes an siRNA for inhibiting MAPT, wherein the siRNA comprises a sense strand sequence and an antisense strand sequence, wherein:
[0052] (i) the antisense strand sequence comprises at least 19, 20, or 21 contiguous nucleotides of any one of SEQ ID NOs: 4908, 4920, 4924, 5057, 4916, 4912, 5080, 5104, or 5128; and
[0053] (ii) the sense strand sequence comprises at least 19, 20, or 21 contiguous nucleotides of any one of SEQ ID NOs: 4906, 4926, 4946, 4966, 4986, 5006, 4918, 4938, 4958, 4978, 4998, 4922, 4942, 4962, 4982, 5002, 5022, 5054, 5060, 5064, 5066, 5070, 5074, 4914, 4934, 4954, 4974, 4994, 5014, 4910, 4930, 4950, 4970, 4990, 5010, 5077, 5084, 5088, 5092, 5096, 5098, 5101, 5108, 5112, 5116, 5120, 5122, 5125, 5132, 5136, 5140, 5144, or 5146;
[0054] wherein the sense strand sequence and the antisense strand sequence comprise a region of complementarity of at least 15 nucleotides.
   13. The siRNA of any one of embodiments 8-11 or the AAV viral genome of embodiment 12, wherein the region of complementarity comprises at least 18, 19, or 20 nucleotides.
   14. The siRNA of any one of embodiments 1-10 or the AAV viral genome of embodiment 12 or 13, wherein the antisense strand sequence comprises at least 19, 20, or 21 contiguous nucleotides of any one of SEQ ID NOs: 4908, 4920, 4924, or 4912.
   15. The siRNA of any one of embodiments 1-10 or the AAV viral genome of any one of embodiments 12-14, wherein the sense strand sequence comprises at least 19, 20, or 21 contiguous nucleotides of any one of SEQ ID NOs: 4906, 4926, 4946, 4966, 4986, 5006, 4918, 4938, 4958, 4978, 4998, 4922, 4942, 4962, 4982, 5002, 5022, 4910, 4930, 4950, 4970, 4990, or 5010.
   16. The siRNA of any one of embodiments 1-10 or the AAV viral genome of any one of embodiments 12-15, wherein:
[0055] (i) the antisense strand sequence comprises at least 19, 20, or 21 contiguous nucleotides from the nucleotide sequence of SEQ ID NO: 4908 and the sense strand sequence comprises at least 19, 20, or 21 contiguous nucleotides from the nucleotide sequence of any one of SEQ ID NOs: 4906, 4926, 4946, 4966, 4986, or 5006;
[0056] (ii) the antisense strand sequence comprises at least 19, 20, or 21 contiguous nucleotides from the nucleotide sequence of SEQ ID NO: 4920 and the sense strand sequence comprises at least 19, 20, or 21 contiguous nucleotides from the nucleotide sequence of any one of SEQ ID NOs: 4918, 4938, 4958, 4978, or 4998;
[0057] (iii) the antisense strand sequence comprises at least 19, 20, or 21 contiguous nucleotides from the nucleotide sequence of SEQ ID NO: 4924 and the sense strand sequence comprises at least 19, 20, or 21 contiguous nucleotides from the nucleotide sequence of any one of SEQ ID NOs: 4922, 4942, 4962, 4982, 5002, or 5022;
[0058] (iv) the antisense strand sequence comprises at least 19, 20, or 21 contiguous nucleotides from the nucleotide sequence of SEQ ID NO: 4912 and the sense strand sequence comprises at least 19, 20, or 21 contiguous nucleotides from the nucleotide sequence of any one of SEQ ID NOs: 4910, 4930, 4950, 4970, 4990, or 5010;
[0059] (v) the antisense strand sequence comprises at least 19, 20, or 21 contiguous nucleotides from the nucleotide sequence of SEQ ID NO: 4916 and the sense strand sequence comprises at least 19, 20, or 21 contiguous nucleotides from the nucleotide sequence of any one of SEQ ID NOs: 4914, 4934, 4954, 4974, 4994, or 5014;
[0060] (vi) the antisense strand sequence comprises at least 19, 20, or 21 contiguous nucleotides from the nucleotide sequence of SEQ ID NO: 5104; and the sense strand sequence comprises at least 19, 20, or 21 contiguous nucleotides from the nucleotide sequence of any one of SEQ ID NOs: 5101, 5108, 5112, 5116, 5120, or 5122;
[0061] (vii) the antisense strand sequence comprises at least 19, 20, or 21 contiguous nucleotides from the nucleotide sequence of SEQ ID NO: 5128; and the sense strand sequence comprises at least 19, 20, or 21 contiguous nucleotides from the nucleotide sequence of any one of SEQ ID NOs: 5125, 5132, 5136, 5140, 5144, or 5146;
[0062] (viii) the antisense strand sequence comprises at least 19, 20, or 21 contiguous nucleotides from the nucleotide sequence of SEQ ID NO: 5080; and the sense strand sequence comprises at least 19, 20, or 21 contiguous nucleotides from the nucleotide sequence of any one of SEQ ID NOs: 5077, 5084, 5088, 5092, 5096, or 5098; or
[0063] (ix) the antisense strand sequence comprises at least 19, 20, or 21 contiguous nucleotides from the nucleotide sequence of SEQ ID NO: 5057; and the sense strand sequence comprises at least 19, 20, or 21 contiguous nucleotides from the nucleotide sequence of any one of SEQ ID NOs: 5054, 5060, 5064, 5066, 5070, or 5074.
   17. The siRNA of any one of embodiments 1-10 or the AAV viral genome of any one of embodiments 12-16, wherein the antisense strand sequence comprises at least 19, 20, or 21 contiguous nucleotides from the nucleotide sequence of SEQ ID NO: 4908 and the sense strand sequence comprises at least 19, 20, or 21 contiguous nucleotides from the nucleotide sequence of SEQ ID NO: 4906.
   18. The siRNA of any one of embodiments 1-10 or the AAV viral genome of any one of embodiments 12-16, wherein the antisense strand sequence comprises at least 19, 20, or 21 contiguous nucleotides from the nucleotide sequence of SEQ ID NO: 4920 and the sense strand sequence comprises at least 19, 20, or 21 contiguous nucleotides from the nucleotide sequence of SEQ ID NO: 4918.
   19. The siRNA of any one of embodiments 1-10 or the AAV viral genome of any one of embodiments 12-16, wherein the antisense strand sequence comprises at least 19, 20, or 21 contiguous nucleotides from the nucleotide sequence of SEQ ID NO: 4924 and the sense strand sequence comprises at least 19, 20, or 21 contiguous nucleotides from the nucleotide sequence of SEQ ID NO: 4922.
   20. The siRNA of any one of embodiments 1-10 or the AAV viral genome of any one of embodiments 12-16, wherein the antisense strand sequence comprises at least 19, 20, or 21 contiguous nucleotides from the nucleotide sequence of SEQ ID NO: 4908 and the sense strand sequence comprises at least 19, 20, or 21 contiguous nucleotides from the nucleotide sequence of SEQ ID NO: 4966.
   21. The siRNA of any one of embodiments 1-10 or the AAV viral genome of any one of embodiments 12-16, wherein the antisense strand sequence comprises at least 19, 20, or 21 contiguous nucleotides from the nucleotide sequence of SEQ ID NO: 4912 and the sense strand sequence comprises at least 19, 20, or 21 contiguous nucleotides from the nucleotide sequence of SEQ ID NO: 4970.
   22. The siRNA of any one of embodiments 1-10 or the AAV viral genome of any one of embodiments 12-16, wherein the antisense strand sequence comprises at least 19, 20, or 21 contiguous nucleotides from the nucleotide sequence of SEQ ID NO: 4920 and the sense strand sequence comprises at least 19, 20, or 21 contiguous nucleotides from the nucleotide sequence of SEQ ID NO: 4978.
   23. The siRNA of any one of embodiments 1-10 or the AAV viral genome of any one of embodiments 12-16, wherein the antisense strand sequence comprises at least 19, 20, or 21 contiguous nucleotides from the nucleotide sequence of SEQ ID NO: 4924 and the sense strand sequence comprises at least 19, 20, or 21 contiguous nucleotides from the nucleotide sequence of SEQ ID NO: 4982.
   24. The siRNA of any one of embodiments 1-10 or the AAV viral genome of any one of embodiments 12-16, wherein:
[0064] (i) the antisense strand sequence comprises at least 19, 20, or 21 contiguous nucleotides from the nucleotide sequence of SEQ ID NO: 4912; and the sense strand sequence comprises at least 19, 20, or 21 contiguous nucleotides from the nucleotide sequence of SEQ ID NO: 4910;
[0065] (ii) the antisense strand sequence comprises at least 19, 20, or 21 contiguous nucleotides from the nucleotide sequence of SEQ ID NO: 4916; and the sense strand sequence comprises at least 19, 20, or 21 contiguous nucleotides from the nucleotide sequence of SEQ ID NO: 4914;
[0066] (iii) the antisense strand sequence comprises at least 19, 20, or 21 contiguous nucleotides from the nucleotide sequence of SEQ ID NO: 5057; and the sense strand sequence comprises at least 19, 20, or 21 contiguous nucleotides from the nucleotide sequence of SEQ ID NO: 5054;
[0067] (iv) the antisense strand sequence comprises at least 19, 20, or 21 contiguous nucleotides from the nucleotide sequence of SEQ ID NO: 4908; and the sense strand sequence comprises at least 19, 20, or 21 contiguous nucleotides from the nucleotide sequence of SEQ ID NO: 4926;
[0068] (v) the antisense strand sequence comprises at least 19, 20, or 21 contiguous nucleotides from the nucleotide sequence of SEQ ID NO: 4912; and the sense strand sequence comprises at least 19, 20, or 21 contiguous nucleotides from the nucleotide sequence of SEQ ID NO: 4930;
[0069] (vi) the antisense strand sequence comprises at least 19, 20, or 21 contiguous nucleotides from the nucleotide sequence of SEQ ID NO: 4916; and the sense strand sequence comprises at least 19, 20, or 21 contiguous nucleotides from the nucleotide sequence of SEQ ID NO: 4934;
[0070] (vii) the antisense strand sequence comprises at least 19, 20, or 21 contiguous nucleotides from the nucleotide sequence of SEQ ID NO: 4920; and the sense strand sequence comprises at least 19, 20, or 21 contiguous nucleotides from the nucleotide sequence of SEQ ID NO: 4938;
[0071] (viii) the antisense strand sequence comprises at least 19, 20, or 21 contiguous nucleotides from the nucleotide sequence of SEQ ID NO: 4924; and the sense strand sequence comprises at least 19, 20, or 21 contiguous nucleotides from the nucleotide sequence of SEQ ID NO: 4942;
[0072] (ix) the antisense strand sequence comprises at least 19, 20, or 21 contiguous nucleotides from the nucleotide sequence of SEQ ID NO: 5057; and the sense strand sequence comprises at least 19, 20, or 21 contiguous nucleotides from the nucleotide sequence of SEQ ID NO: 5060;
[0073] (x) the antisense strand sequence comprises at least 19, 20, or 21 contiguous nucleotides from the nucleotide sequence of SEQ ID NO: 4908; and the sense strand sequence comprises at least 19, 20, or 21 contiguous nucleotides from the nucleotide sequence of SEQ ID NO: 4946;
[0074] (xi) the antisense strand sequence comprises at least 19, 20, or 21 contiguous nucleotides from the nucleotide sequence of SEQ ID NO: 4912; and the sense strand sequence comprises at least 19, 20, or 21 contiguous nucleotides from the nucleotide sequence of SEQ ID NO: 4950;
[0075] (xii) the antisense strand sequence comprises at least 19, 20, or 21 contiguous nucleotides from the nucleotide sequence of SEQ ID NO: 4916; and the sense strand sequence comprises at least 19, 20, or 21 contiguous nucleotides from the nucleotide sequence of SEQ ID NO: 4954;
[0076] (xiii) the antisense strand sequence comprises at least 19, 20, or 21 contiguous nucleotides from the nucleotide sequence of SEQ ID NO: 4920; and the sense strand sequence comprises at least 19, 20, or 21 contiguous nucleotides from the nucleotide sequence of SEQ ID NO: 4958;
[0077] (xiv) the antisense strand sequence comprises at least 19, 20, or 21 contiguous nucleotides from the nucleotide sequence of SEQ ID NO: 4924; and the sense strand sequence comprises at least 19, 20, or 21 contiguous nucleotides from the nucleotide sequence of SEQ ID NO: 4962;
[0078] (xv) the antisense strand sequence comprises at least 19, 20, or 21 contiguous nucleotides from the nucleotide sequence of SEQ ID NO: 5057; and the sense strand sequence comprises at least 19, 20, or 21 contiguous nucleotides from the nucleotide sequence of SEQ ID NO: 5064;
[0079] (xvi) the antisense strand sequence comprises at least 19, 20, or 21 contiguous nucleotides from the nucleotide sequence of SEQ ID NO: 4916; and the sense strand sequence comprises at least 19, 20, or 21 contiguous nucleotides from the nucleotide sequence of SEQ ID NO: 4974;
[0080] (xvii) the antisense strand sequence comprises at least 19, 20, or 21 contiguous nucleotides from the nucleotide sequence of SEQ ID NO: 5057; and the sense strand sequence comprises at least 19, 20, or 21 contiguous nucleotides from the nucleotide sequence of SEQ ID NO: 5066;
[0081] (xviii) the antisense strand sequence comprises at least 19, 20, or 21 contiguous nucleotides from the nucleotide sequence of SEQ ID NO: 4908; and the sense strand sequence comprises at least 19, 20, or 21 contiguous nucleotides from the nucleotide sequence of SEQ ID NO: 4986;
[0082] (xix) the antisense strand sequence comprises at least 19, 20, or 21 contiguous nucleotides from the nucleotide sequence of SEQ ID NO: 4912; and the sense strand sequence comprises at least 19, 20, or 21 contiguous nucleotides from the nucleotide sequence of SEQ ID NO: 4990;
[0083] (xx) the antisense strand sequence comprises at least 19, 20, or 21 contiguous nucleotides from the nucleotide sequence of SEQ ID NO: 4916; and the sense strand sequence comprises at least 19, 20, or 21 contiguous nucleotides from the nucleotide sequence of SEQ ID NO: 4994;
[0084] (xxi) the antisense strand sequence comprises at least 19, 20, or 21 contiguous nucleotides from the nucleotide sequence of SEQ ID NO: 4920; and the sense strand sequence comprises at least 19, 20, or 21 contiguous nucleotides from the nucleotide sequence of SEQ ID NO: 4998;
[0085] (xxii) the antisense strand sequence comprises at least 19, 20, or 21 contiguous nucleotides from the nucleotide sequence of SEQ ID NO: 4924; and the sense strand sequence comprises at least 19, 20, or 21 contiguous nucleotides from the nucleotide sequence of SEQ ID NO: 5002;
[0086] (xxiii) the antisense strand sequence comprises at least 19, 20, or 21 contiguous nucleotides from the nucleotide sequence of SEQ ID NO: 5057; and the sense strand sequence comprises at least 19, 20, or 21 contiguous nucleotides from the nucleotide sequence of SEQ ID NO: 5070;
[0087] (xxiv) the antisense strand sequence comprises at least 19, 20, or 21 contiguous nucleotides from the nucleotide sequence of SEQ ID NO: 4908; and the sense strand sequence comprises at least 19, 20, or 21 contiguous nucleotides from the nucleotide sequence of SEQ ID NO: 5006;
[0088] (xxv) the antisense strand sequence comprises at least 19, 20, or 21 contiguous nucleotides from the nucleotide sequence of SEQ ID NO: 4912; and the sense strand sequence comprises at least 19, 20, or 21 contiguous nucleotides from the nucleotide sequence of SEQ ID NO: 5010;
[0089] (xxvi) the antisense strand sequence comprises at least 19, 20, or 21 contiguous nucleotides from the nucleotide sequence of SEQ ID NO: 4916; and the sense strand sequence comprises at least 19, 20, or 21 contiguous nucleotides from the nucleotide sequence of SEQ ID NO: 5014;
[0090] (xxvii) the antisense strand sequence comprises at least 19, 20, or 21 contiguous nucleotides from the nucleotide sequence of SEQ ID NO: 4920; and the sense strand sequence comprises at least 19, 20, or 21 contiguous nucleotides from the nucleotide sequence of SEQ ID NO: 4958;
[0091] (xxviii) the antisense strand sequence comprises at least 19, 20, or 21 contiguous nucleotides from the nucleotide sequence of SEQ ID NO: 4924; and the sense strand sequence comprises at least 19, 20, or 21 contiguous nucleotides from the nucleotide sequence of SEQ ID NO: 5022;
[0092] (xxvii) the antisense strand sequence comprises at least 19, 20, or 21 contiguous nucleotides from the nucleotide sequence of SEQ ID NO: 5057; and the sense strand sequence comprises at least 19, 20, or 21 contiguous nucleotides from the nucleotide sequence of SEQ ID NO: 5074;
[0093] (xxix) the antisense strand sequence comprises at least 19, 20, or 21 contiguous nucleotides from the nucleotide sequence of SEQ ID NO: 5080; and the sense strand sequence comprises at least 19, 20, or 21 contiguous nucleotides from the nucleotide sequence of SEQ ID NO: 5077;
[0094] (xxx) the antisense strand sequence comprises at least 19, 20, or 21 contiguous nucleotides from the nucleotide sequence of SEQ ID NO: 5080; and the sense strand sequence comprises at least 19, 20, or 21 contiguous nucleotides from the nucleotide sequence of SEQ ID NO: 5084;
[0095] (xxxi) the antisense strand sequence comprises at least 19, 20, or 21 contiguous nucleotides from the nucleotide sequence of SEQ ID NO: 5080; and the sense strand sequence comprises at least 19, 20, or 21 contiguous nucleotides from the nucleotide sequence of SEQ ID NO: 5088;
[0096] (xxxii) the antisense strand sequence comprises at least 19, 20, or 21 contiguous nucleotides from the nucleotide sequence of SEQ ID NO: 5080; and the sense strand sequence comprises at least 19, 20, or 21 contiguous nucleotides from the nucleotide sequence of SEQ ID NO: 5092;
[0097] (xxxiii) the antisense strand sequence comprises at least 19, 20, or 21 contiguous nucleotides from the nucleotide sequence of SEQ ID NO: 5080; and the sense strand sequence comprises at least 19, 20, or 21 contiguous nucleotides from the nucleotide sequence of SEQ ID NO: 5096;
[0098] (xxxiv) the antisense strand sequence comprises at least 19, 20, or 21 contiguous nucleotides from the nucleotide sequence of SEQ ID NO: 5080; and the sense strand sequence comprises at least 19, 20, or 21 contiguous nucleotides from the nucleotide sequence of SEQ ID NO: 5098;
[0099] (xxxv) the antisense strand sequence comprises at least 19, 20, or 21 contiguous nucleotides from the nucleotide sequence of SEQ ID NO: 5104; and the sense strand sequence comprises at least 19, 20, or 21 contiguous nucleotides from the nucleotide sequence of SEQ ID NO: 5101;
[0100] (xxxvi) the antisense strand sequence comprises at least 19, 20, or 21 contiguous nucleotides from the nucleotide sequence of SEQ ID NO: 5104; and the sense strand sequence comprises at least 19, 20, or 21 contiguous nucleotides from the nucleotide sequence of SEQ ID NO: 5108;
[0101] (xxxvii) the antisense strand sequence comprises at least 19, 20, or 21 contiguous nucleotides from the nucleotide sequence of SEQ ID NO: 5104; and the sense strand sequence comprises at least 19, 20, or 21 contiguous nucleotides from the nucleotide sequence of SEQ ID NO: 5112;
[0102] (xxxviii) the antisense strand sequence comprises at least 19, 20, or 21 contiguous nucleotides from the nucleotide sequence of SEQ ID NO: 5104; and the sense strand sequence comprises at least 19, 20, or 21 contiguous nucleotides from the nucleotide sequence of SEQ ID NO: 5116;
[0103] (xxxix) the antisense strand sequence comprises at least 19, 20, or 21 contiguous nucleotides from the nucleotide sequence of SEQ ID NO: 5104; and the sense strand sequence comprises at least 19, 20, or 21 contiguous nucleotides from the nucleotide sequence of SEQ ID NO: 5120;
[0104] (xl) the antisense strand sequence comprises at least 19, 20, or 21 contiguous nucleotides from the nucleotide sequence of SEQ ID NO: 5104; and the sense strand sequence comprises at least 19, 20, or 21 contiguous nucleotides from the nucleotide sequence of SEQ ID NO: 5122;
[0105] (xli) the antisense strand sequence comprises at least 19, 20, or 21 contiguous nucleotides from the nucleotide sequence of SEQ ID NO: 5128; and the sense strand sequence comprises at least 19, 20, or 21 contiguous nucleotides from the nucleotide sequence of SEQ ID NO: 5125;
[0106] (xlii) the antisense strand sequence comprises at least 19, 20, or 21 contiguous nucleotides from the nucleotide sequence of SEQ ID NO: 5128; and the sense strand sequence comprises at least 19, 20, or 21 contiguous nucleotides from the nucleotide sequence of SEQ ID NO: 5132;
[0107] (xliii) the antisense strand sequence comprises at least 19, 20, or 21 contiguous nucleotides from the nucleotide sequence of SEQ ID NO: 5128; and the sense strand sequence comprises at least 19, 20, or 21 contiguous nucleotides from the nucleotide sequence of SEQ ID NO: 5136;
[0108] (xliv) the antisense strand sequence comprises at least 19, 20, or 21 contiguous nucleotides from the nucleotide sequence of SEQ ID NO: 5128; and the sense strand sequence comprises at least 19, 20, or 21 contiguous nucleotides from the nucleotide sequence of SEQ ID NO: 5140;
[0109] (xlv) the antisense strand sequence comprises at least 19, 20, or 21 contiguous nucleotides from the nucleotide sequence of SEQ ID NO: 5128; and the sense strand sequence comprises at least 19, 20, or 21 contiguous nucleotides from the nucleotide sequence of SEQ ID NO: 5144; or (xlvi) the antisense strand sequence comprises at least 19, 20, or 21 contiguous nucleotides from the nucleotide sequence of SEQ ID NO: 5128; and the sense strand sequence comprises at least 19, 20, or 21 contiguous nucleotides from the nucleotide sequence of SEQ ID NO: 5146.
   25. The siRNA of any one of embodiments 1-11 or 13 or the AAV viral genome of any one of embodiments 12-24, wherein the antisense strand sequence comprises at least 20 contiguous nucleotides of any one of SEQ ID NOs: 4908, 4920, 4924, or 4912.
   26. The siRNA of any one of embodiments 1-11, 13, or 25 or the AAV viral genome of any one of embodiments 12-25, wherein the sense strand sequence comprises at least 20 contiguous nucleotides of any one of SEQ ID NOs: 4906, 4926, 4946, 4966, 4986, 5006, 4918, 4938, 4958, 4978, 4998, 4922, 4942, 4962, 4982, 5002, 5022, 4910, 4930, 4950, 4970, 4990, or 5010.
   27. The siRNA of any one of embodiments 1-11, 13, 25, or 26 or the AAV viral genome of any one of embodiments 12-26, wherein:
[0110] (i) the antisense strand sequence comprises at least 20 contiguous nucleotides from the nucleotide sequence of SEQ ID NO: 4908 and the sense strand sequence comprises at least 20 contiguous nucleotides from the nucleotide sequence of any one of SEQ ID NOs: 4906, 4926, 4946, 4966, 4986, or 5006;
[0111] (ii) the antisense strand sequence comprises at least 20 contiguous nucleotides from the nucleotide sequence of SEQ ID NO: 4920 and the sense strand sequence comprises at least 20 contiguous nucleotides from the nucleotide sequence of any one of SEQ ID NOs: 4918, 4938, 4958, 4978, or 4998;
[0112] (iii) the antisense strand sequence comprises at least 20 contiguous nucleotides from the nucleotide sequence of SEQ ID NO: 4924 and the sense strand sequence comprises at least 20 contiguous nucleotides from the nucleotide sequence of any one of SEQ ID NOs: 4922, 4942, 4962, 4982, 5002, or 5022;
[0113] (iv) the antisense strand sequence comprises at least 20 contiguous nucleotides from the nucleotide sequence of SEQ ID NO: 4912 and the sense strand sequence comprises at least 20 contiguous nucleotides from the nucleotide sequence of any one of SEQ ID NOs: 4910, 4930, 4950, 4970, 4990, or 5010;
[0114] (v) the antisense strand sequence comprises at least 20 contiguous nucleotides from the nucleotide sequence of SEQ ID NO: 4916 and the sense strand sequence comprises at least 20 contiguous nucleotides from the nucleotide sequence of any one of SEQ ID NOs: 4914, 4934, 4954, 4974, 4994, or 5014;
[0115] (vi) the antisense strand sequence comprises at least 20 contiguous nucleotides from the nucleotide sequence of SEQ ID NO: 5104; and the sense strand sequence comprises at least 20 contiguous nucleotides from the nucleotide sequence of any one of SEQ ID NOs: 5101, 5108, 5112, 5116, 5120, or 5122;
[0116] (vii) the antisense strand sequence comprises at least 20 contiguous nucleotides from the nucleotide sequence of SEQ ID NO: 5128; and the sense strand sequence comprises at least 20 contiguous nucleotides from the nucleotide sequence of any one of SEQ ID NOs: 5125, 5132, 5136, 5140, 5144, or 5146;
[0117] (viii) the antisense strand sequence comprises at least 20 contiguous nucleotides from the nucleotide sequence of SEQ ID NO: 5080; and the sense strand sequence comprises at least 20 contiguous nucleotides from the nucleotide sequence of any one of SEQ ID NOs: 5077, 5084, 5088, 5092, 5096, or 5098; or
[0118] (ix) the antisense strand sequence comprises at least 20 contiguous nucleotides from the nucleotide sequence of SEQ ID NO: 5057; and the sense strand sequence comprises at least 20 contiguous nucleotides from the nucleotide sequence of any one of SEQ ID NOs: 5054, 5060, 5064, 5066, 5070, or 5074.
   28. The siRNA of any one of embodiments 1-11, 13, or 25-27 or the AAV viral genome of any one of embodiments 11-17 or 25-27, wherein the antisense strand sequence comprises at least 20 contiguous nucleotides from the nucleotide sequence of SEQ ID NO: 4908 and the sense strand sequence comprises at least 20 contiguous nucleotides from the nucleotide sequence of SEQ ID NO: 4906.
   29. The siRNA of any one of embodiments 1-11, 13, or 25-27 or the AAV viral genome of any one of embodiments 11-16, 18, or 25-27, wherein the antisense strand sequence comprises at least 20 contiguous nucleotides from the nucleotide sequence of SEQ ID NO: 4920 and the sense strand sequence comprises at least 20 contiguous nucleotides from the nucleotide sequence of SEQ ID NO: 4918.
   30. The siRNA of any one of embodiments 1-11, 13, or 25-27 or the AAV viral genome of any one of embodiments 11-16, 19, or 25-27, wherein the antisense strand sequence comprises at least 20 contiguous nucleotides from the nucleotide sequence of SEQ ID NO: 4924 and the sense strand sequence comprises at least 20 contiguous nucleotides from the nucleotide sequence of SEQ ID NO: 4922.
   31. The siRNA of any one of embodiments 1-11, 13, or 25-27 or the AAV viral genome of any one of embodiments 11-16, 20, or 25-27, wherein the antisense strand sequence comprises at least 20 contiguous nucleotides from the nucleotide sequence of SEQ ID NO: 4908 and the sense strand sequence comprises at least 20 contiguous nucleotides from the nucleotide sequence of SEQ ID NO: 4966.
   32. The siRNA of any one of embodiments 1-11, 13, or 25-27 or the AAV viral genome of any one of embodiments 11-16, 21, or 25-27, wherein the antisense strand sequence comprises at least 20 contiguous nucleotides from the nucleotide sequence of SEQ ID NO: 4912 and the sense strand sequence comprises at least 20 contiguous nucleotides from the nucleotide sequence of SEQ ID NO: 4970.
   33. The siRNA of any one of embodiments 1-11, 13, or 25-27 or the AAV viral genome of any one of embodiments 11-16, 22, or 25-27, wherein the antisense strand sequence comprises at least 20 contiguous nucleotides from the nucleotide sequence of SEQ ID NO: 4920 and the sense strand sequence comprises at least 20 contiguous nucleotides from the nucleotide sequence of SEQ ID NO: 4978.
   34. The siRNA of any one of embodiments 1-11, 13, or 25-27 or the AAV viral genome of any one of embodiments 11-16, 23, or 25-27, wherein the antisense strand sequence comprises at least 20 contiguous nucleotides from the nucleotide sequence of SEQ ID NO: 4924 and the sense strand sequence comprises at least 20 contiguous nucleotides from the nucleotide sequence of SEQ ID NO: 4982.
   35. The siRNA of any one of embodiments 1-11, 13, or 25-27 or the AAV viral genome of any one of embodiments 11-16 or 24-27, wherein:
[0119] (i) the antisense strand sequence comprises at least 20 contiguous nucleotides from the nucleotide sequence of SEQ ID NO: 4912; and the sense strand sequence comprises at least 20 contiguous nucleotides from the nucleotide sequence of SEQ ID NO: 4910;
[0120] (ii) the antisense strand sequence comprises at least 20 contiguous nucleotides from the nucleotide sequence of SEQ ID NO: 4916; and the sense strand sequence comprises at least 20 contiguous nucleotides from the nucleotide sequence of SEQ ID NO: 4914;
[0121] (iii) the antisense strand sequence comprises at least 20 contiguous nucleotides from the nucleotide sequence of SEQ ID NO: 5057; and the sense strand sequence comprises at least 20 contiguous nucleotides from the nucleotide sequence of SEQ ID NO: 5054;
[0122] (iv) the antisense strand sequence comprises at least 20 contiguous nucleotides from the nucleotide sequence of SEQ ID NO: 4908; and the sense strand sequence comprises at least 20 contiguous nucleotides from the nucleotide sequence of SEQ ID NO: 4926;
[0123] (v) the antisense strand sequence comprises at least 20 contiguous nucleotides from the nucleotide sequence of SEQ ID NO: 4912; and the sense strand sequence comprises at least 20 contiguous nucleotides from the nucleotide sequence of SEQ ID NO: 4930;
[0124] (vi) the antisense strand sequence comprises at least 20 contiguous nucleotides from the nucleotide sequence of SEQ ID NO: 4916; and the sense strand sequence comprises at least 20 contiguous nucleotides from the nucleotide sequence of SEQ ID NO: 4934;
[0125] (vii) the antisense strand sequence comprises at least 20 contiguous nucleotides from the nucleotide sequence of SEQ ID NO: 4920; and the sense strand sequence comprises at least 20 contiguous nucleotides from the nucleotide sequence of SEQ ID NO: 4938;
[0126] (viii) the antisense strand sequence comprises at least 20 contiguous nucleotides from the nucleotide sequence of SEQ ID NO: 4924; and the sense strand sequence comprises at least 20 contiguous nucleotides from the nucleotide sequence of SEQ ID NO: 4942;
[0127] (ix) the antisense strand sequence comprises at least 20 contiguous nucleotides from the nucleotide sequence of SEQ ID NO: 5057; and the sense strand sequence comprises at least 20 contiguous nucleotides from the nucleotide sequence of SEQ ID NO: 5060;
[0128] (x) the antisense strand sequence comprises at least 20 contiguous nucleotides from the nucleotide sequence of SEQ ID NO: 4908; and the sense strand sequence comprises at least 20 contiguous nucleotides from the nucleotide sequence of SEQ ID NO: 4946;
[0129] (xi) the antisense strand sequence comprises at least 20 contiguous nucleotides from the nucleotide sequence of SEQ ID NO: 4912; and the sense strand sequence comprises at least 20 contiguous nucleotides from the nucleotide sequence of SEQ ID NO: 4950;
[0130] (xii) the antisense strand sequence comprises at least 20 contiguous nucleotides from the nucleotide sequence of SEQ ID NO: 4916; and the sense strand sequence comprises at least 20 contiguous nucleotides from the nucleotide sequence of SEQ ID NO: 4954;
[0131] (xiii) the antisense strand sequence comprises at least 20 contiguous nucleotides from the nucleotide sequence of SEQ ID NO: 4920; and the sense strand sequence comprises at least 20 contiguous nucleotides from the nucleotide sequence of SEQ ID NO: 4958;
[0132] (xiv) the antisense strand sequence comprises at least 20 contiguous nucleotides from the nucleotide sequence of SEQ ID NO: 4924; and the sense strand sequence comprises at least 20 contiguous nucleotides from the nucleotide sequence of SEQ ID NO: 4962;
[0133] (xv) the antisense strand sequence comprises at least 20 contiguous nucleotides from the nucleotide sequence of SEQ ID NO: 5057; and the sense strand sequence comprises at least 20 contiguous nucleotides from the nucleotide sequence of SEQ ID NO: 5064;
[0134] (xvi) the antisense strand sequence comprises at least 20 contiguous nucleotides from the nucleotide sequence of SEQ ID NO: 4916; and the sense strand sequence comprises at least 20 contiguous nucleotides from the nucleotide sequence of SEQ ID NO: 4974;
[0135] (xvii) the antisense strand sequence comprises at least 20 contiguous nucleotides from the nucleotide sequence of SEQ ID NO: 5057; and the sense strand sequence comprises at least 20 contiguous nucleotides from the nucleotide sequence of SEQ ID NO: 5066;
[0136] (xviii) the antisense strand sequence comprises at least 20 contiguous nucleotides from the nucleotide sequence of SEQ ID NO: 4908; and the sense strand sequence comprises at least 20 contiguous nucleotides from the nucleotide sequence of SEQ ID NO: 4986;
[0137] (xix) the antisense strand sequence comprises at least 20 contiguous nucleotides from the nucleotide sequence of SEQ ID NO: 4912; and the sense strand sequence comprises at least 20 contiguous nucleotides from the nucleotide sequence of SEQ ID NO: 4990;
[0138] (xx) the antisense strand sequence comprises at least 20 contiguous nucleotides from the nucleotide sequence of SEQ ID NO: 4916; and the sense strand sequence comprises at least 20 contiguous nucleotides from the nucleotide sequence of SEQ ID NO: 4994;
[0139] (xxi) the antisense strand sequence comprises at least 20 contiguous nucleotides from the nucleotide sequence of SEQ ID NO: 4920; and the sense strand sequence comprises at least 20 contiguous nucleotides from the nucleotide sequence of SEQ ID NO: 4998;
[0140] (xxii) the antisense strand sequence comprises at least 20 contiguous nucleotides from the nucleotide sequence of SEQ ID NO: 4924; and the sense strand sequence comprises at least 20 contiguous nucleotides from the nucleotide sequence of SEQ ID NO: 5002;
[0141] (xxiii) the antisense strand sequence comprises at least 20 contiguous nucleotides from the nucleotide sequence of SEQ ID NO: 5057; and the sense strand sequence comprises at least 20 contiguous nucleotides from the nucleotide sequence of SEQ ID NO: 5070;
[0142] (xxiv) the antisense strand sequence comprises at least 20 contiguous nucleotides from the nucleotide sequence of SEQ ID NO: 4908; and the sense strand sequence comprises at least 20 contiguous nucleotides from the nucleotide sequence of SEQ ID NO: 5006;
[0143] (xxv) the antisense strand sequence comprises at least 20 contiguous nucleotides from the nucleotide sequence of SEQ ID NO: 4912; and the sense strand sequence comprises at least 20 contiguous nucleotides from the nucleotide sequence of SEQ ID NO: 5010;
[0144] (xxvi) the antisense strand sequence comprises at least 20 contiguous nucleotides from the nucleotide sequence of SEQ ID NO: 4916; and the sense strand sequence comprises at least 20 contiguous nucleotides from the nucleotide sequence of SEQ ID NO: 5014;
[0145] (xxvii) the antisense strand sequence comprises at least 20 contiguous nucleotides from the nucleotide sequence of SEQ ID NO: 4920; and the sense strand sequence comprises at least 20 contiguous nucleotides from the nucleotide sequence of SEQ ID NO: 4958;
[0146] (xxviii) the antisense strand sequence comprises at least 20 contiguous nucleotides from the nucleotide sequence of SEQ ID NO: 4924; and the sense strand sequence comprises at least 20 contiguous nucleotides from the nucleotide sequence of SEQ ID NO: 5022;
[0147] (xxvii) the antisense strand sequence comprises at least 20 contiguous nucleotides from the nucleotide sequence of SEQ ID NO: 5057; and the sense strand sequence comprises at least 20 contiguous nucleotides from the nucleotide sequence of SEQ ID NO: 5074;
[0148] (xxix) the antisense strand sequence comprises at least 20 contiguous nucleotides from the nucleotide sequence of SEQ ID NO: 5080; and the sense strand sequence comprises at least 20 contiguous nucleotides from the nucleotide sequence of SEQ ID NO: 5077;
[0149] (xxx) the antisense strand sequence comprises at least 20 contiguous nucleotides from the nucleotide sequence of SEQ ID NO: 5080; and the sense strand sequence comprises at least 20 contiguous nucleotides from the nucleotide sequence of SEQ ID NO: 5084;
[0150] (xxxi) the antisense strand sequence comprises at least 20 contiguous nucleotides from the nucleotide sequence of SEQ ID NO: 5080; and the sense strand sequence comprises at least 20 contiguous nucleotides from the nucleotide sequence of SEQ ID NO: 5088;
[0151] (xxxii) the antisense strand sequence comprises at least 20 contiguous nucleotides from the nucleotide sequence of SEQ ID NO: 5080; and the sense strand sequence comprises at least 20 contiguous nucleotides from the nucleotide sequence of SEQ ID NO: 5092;
[0152] (xxxiii) the antisense strand sequence comprises at least 20 contiguous nucleotides from the nucleotide sequence of SEQ ID NO: 5080; and the sense strand sequence comprises at least 20 contiguous nucleotides from the nucleotide sequence of SEQ ID NO: 5096;
[0153] (xxxiv) the antisense strand sequence comprises at least 20 contiguous nucleotides from the nucleotide sequence of SEQ ID NO: 5080; and the sense strand sequence comprises at least 20 contiguous nucleotides from the nucleotide sequence of SEQ ID NO: 5098;
[0154] (xxxv) the antisense strand sequence comprises at least 20 contiguous nucleotides from the nucleotide sequence of SEQ ID NO: 5104; and the sense strand sequence comprises at least 20 contiguous nucleotides from the nucleotide sequence of SEQ ID NO: 5101;
[0155] (xxxvi) the antisense strand sequence comprises at least 20 contiguous nucleotides from the nucleotide sequence of SEQ ID NO: 5104; and the sense strand sequence comprises at least 20 contiguous nucleotides from the nucleotide sequence of SEQ ID NO: 5108;
[0156] (xxxvii) the antisense strand sequence comprises at least 20 contiguous nucleotides from the nucleotide sequence of SEQ ID NO: 5104; and the sense strand sequence comprises at least 20 contiguous nucleotides from the nucleotide sequence of SEQ ID NO: 5112;
[0157] (xxxviii) the antisense strand sequence comprises at least 20 contiguous nucleotides from the nucleotide sequence of SEQ ID NO: 5104; and the sense strand sequence comprises at least 20 contiguous nucleotides from the nucleotide sequence of SEQ ID NO: 5116;
[0158] (xxxix) the antisense strand sequence comprises at least 20 contiguous nucleotides from the nucleotide sequence of SEQ ID NO: 5104; and the sense strand sequence comprises at least 20 contiguous nucleotides from the nucleotide sequence of SEQ ID NO: 5120;
[0159] (xl) the antisense strand sequence comprises at least 20 contiguous nucleotides from the nucleotide sequence of SEQ ID NO: 5104; and the sense strand sequence comprises at least 20 contiguous nucleotides from the nucleotide sequence of SEQ ID NO: 5122;
[0160] (xli) the antisense strand sequence comprises at least 20 contiguous nucleotides from the nucleotide sequence of SEQ ID NO: 5128; and the sense strand sequence comprises at least 20 contiguous nucleotides from the nucleotide sequence of SEQ ID NO: 5125;
[0161] (xlii) the antisense strand sequence comprises at least 20 contiguous nucleotides from the nucleotide sequence of SEQ ID NO: 5128; and the sense strand sequence comprises at least 20 contiguous nucleotides from the nucleotide sequence of SEQ ID NO: 5132;
[0162] (xliii) the antisense strand sequence comprises at least 20 contiguous nucleotides from the nucleotide sequence of SEQ ID NO: 5128; and the sense strand sequence comprises at least 20 contiguous nucleotides from the nucleotide sequence of SEQ ID NO: 5136;
[0163] (xliv) the antisense strand sequence comprises at least 20 contiguous nucleotides from the nucleotide sequence of SEQ ID NO: 5128; and the sense strand sequence comprises at least 20 contiguous nucleotides from the nucleotide sequence of SEQ ID NO: 5140;
[0164] (xlv) the antisense strand sequence comprises at least 20 contiguous nucleotides from the nucleotide sequence of SEQ ID NO: 5128; and the sense strand sequence comprises at least 20 contiguous nucleotides from the nucleotide sequence of SEQ ID NO: 5144; or
[0165] (xlvi) the antisense strand sequence comprises at least 20 contiguous nucleotides from the nucleotide sequence of SEQ ID NO: 5128; and the sense strand sequence comprises at least 20 contiguous nucleotides from the nucleotide sequence of SEQ ID NO: 5146.
   36. The siRNA of any one of embodiments 1-11, 13, or 25-35 or the AAV viral genome of any one of embodiments 12-35, wherein the antisense strand sequence comprises the nucleotide sequence of any one of SEQ ID NOs: 4908, 4920, 4924, or 4912.
   37. The siRNA of any one of embodiments 1-11, 13, or 25-36 or the AAV viral genome of any one of embodiments 12-36, wherein the sense strand sequence comprises at the nucleotide sequence of any one of SEQ ID NOs: 4906, 4926, 4946, 4966, 4986, 5006, 4918, 4938, 4958, 4978, 4998, 4922, 4942, 4962, 4982, 5002, 5022, 4910, 4930, 4950, 4970, 4990, or 5010.
   38. The siRNA of any one of embodiments 1-11, 13, or 25-37 or the AAV viral genome of any one of embodiments 12-37, wherein:
[0166] (i) the antisense strand sequence comprises the nucleotide sequence of SEQ ID NO: 4908 and the sense strand sequence comprises the nucleotide sequence of any one of SEQ ID NOs: 4906, 4926, 4946, 4966, 4986, or 5006;
[0167] (ii) the antisense strand sequence comprises the nucleotide sequence of SEQ ID NO: 4920 and the sense strand sequence comprises the nucleotide sequence of any one of SEQ ID NOs: 4918, 4938, 4958, 4978, or 4998;
[0168] (iii) the antisense strand sequence comprises the nucleotide sequence of SEQ ID NO: 4924 and the sense strand sequence comprises the nucleotide sequence of any one of SEQ ID NOs: 4922, 4942, 4962, 4982, 5002, or 5022;
[0169] (iv) the antisense strand sequence comprises the nucleotide sequence of SEQ ID NO: 4912 and the sense strand sequence comprises the nucleotide sequence of any one of SEQ ID NOs: 4910, 4930, 4950, 4970, 4990, or 5010;
[0170] (v) the antisense strand sequence comprises the nucleotide sequence of SEQ ID NO: 4916 and the sense strand sequence comprises the nucleotide sequence of any one of SEQ ID NOs: 4914, 4934, 4954, 4974, 4994, or 5014;
[0171] (vi) the antisense strand sequence comprises the nucleotide sequence of SEQ ID NO: 5104; and the sense strand sequence comprises the nucleotide sequence of any one of SEQ ID NOs: 5101, 5108, 5112, 5116, 5120, or 5122;
[0172] (vii) the antisense strand sequence comprises the nucleotide sequence of SEQ ID NO: 5128; and the sense strand sequence comprises the nucleotide sequence of any one of SEQ ID NOs: 5125, 5132, 5136, 5140, 5144, or 5146;
[0173] (viii) the antisense strand sequence comprises the nucleotide sequence of SEQ ID NO: 5080; and the sense strand sequence comprises the nucleotide sequence of any one of SEQ ID NOs: 5077, 5084, 5088, 5092, 5096, or 5098; or
[0174] (ix) the antisense strand sequence comprises the nucleotide sequence of SEQ ID NO: 5057; and the sense strand sequence comprises the nucleotide sequence of any one of SEQ ID NOs: 5054, 5060, 5064, 5066, 5070, or 5074.
   39. The siRNA of any one of embodiments 1-11, 13, 25-28, or 36-39 or the AAV viral genome of any one of embodiments 11-17, 25-28, or 36-39, wherein the antisense strand sequence comprises the nucleotide sequence of SEQ ID NO: 4908 and the sense strand sequence comprises the nucleotide sequence of SEQ ID NO: 4906.
   40. The siRNA of any one of embodiments 1-11, 13, 25-27, 29, or 36-39 or the AAV viral genome of any one of embodiments 11-16, 18, 25-27, 29, or 36-39, wherein the antisense strand sequence comprises the nucleotide sequence of SEQ ID NO: 4920 and the sense strand sequence comprises the nucleotide sequence of SEQ ID NO: 4918.
   41. The siRNA of any one of embodiments 1-11, 13, 25-27, 30, or 36-39 or the AAV viral genome of any one of embodiments 11-16, 19, 25-27, 30, or 36-39, wherein the antisense strand sequence comprises the nucleotide sequence of SEQ ID NO: 4924 and the sense strand sequence comprises the nucleotide sequence of SEQ ID NO: 4922.
   42. The siRNA of any one of embodiments 1-11, 13, 25-27, 31, or 36-39 or the AAV viral genome of any one of embodiments 11-16, 19, 25-27, 31, or 36-39, wherein the antisense strand sequence comprises the nucleotide sequence of SEQ ID NO: 4908 and the sense strand sequence comprises the nucleotide sequence of SEQ ID NO: 4966.
   43. The siRNA of any one of embodiments 1-11, 13, 25-27, 32, or 36-39 or the AAV viral genome of any one of embodiments 11-16, 19, 25-27, 62, or 36-39, wherein the antisense strand sequence comprises the nucleotide sequence of SEQ ID NO: 4912 and the sense strand sequence comprises the nucleotide sequence of SEQ ID NO: 4970.
   44. The siRNA of any one of embodiments 1-11, 13, 25-27, 33, or 36-39 or the AAV viral genome of any one of embodiments 11-16, 19, 25-27, 33, or 36-39, wherein the antisense strand sequence comprises the nucleotide sequence of SEQ ID NO: 4920 and the sense strand sequence comprises the nucleotide sequence of SEQ ID NO: 4978.
   45. The siRNA of any one of embodiments 1-11, 13, 25-27, 34, or 36-39 or the AAV viral genome of any one of embodiments 11-16, 19, 25-27, 34, or 36-39, wherein the antisense strand sequence comprises the nucleotide sequence of SEQ ID NO: 4924 and the sense strand sequence comprises the nucleotide sequence of SEQ ID NO: 4982.
   46. The siRNA of any one of embodiments 1-11, 13, 25-27, 35, or 36-39 or the AAV viral genome of any one of embodiments 11-16, 19, 25-27, 35, or 36-39, wherein:
[0175] (i) the antisense strand sequence comprises the nucleotide sequence of SEQ ID NO: 4912; and the sense strand sequence comprises the nucleotide sequence of SEQ ID NO: 4910;
[0176] (ii) the antisense strand sequence comprises the nucleotide sequence of SEQ ID NO: 4916; and the sense strand sequence comprises the nucleotide sequence of SEQ ID NO: 4914;
[0177] (iii) the antisense strand sequence comprises the nucleotide sequence of SEQ ID NO: 5057; and the sense strand sequence comprises the nucleotide sequence of SEQ ID NO: 5054;
[0178] (iv) the antisense strand sequence comprises the nucleotide sequence of SEQ ID NO: 4908; and the sense strand sequence comprises the nucleotide sequence of SEQ ID NO: 4926;
[0179] (v) the antisense strand sequence comprises the nucleotide sequence of SEQ ID NO: 4912; and the sense strand sequence comprises the nucleotide sequence of SEQ ID NO: 4930;
[0180] (vi) the antisense strand sequence comprises the nucleotide sequence of SEQ ID NO: 4916; and the sense strand sequence comprises the nucleotide sequence of SEQ ID NO: 4934;
[0181] (vii) the antisense strand sequence comprises the nucleotide sequence of SEQ ID NO: 4920; and the sense strand sequence comprises the nucleotide sequence of SEQ ID NO: 4938;
[0182] (viii) the antisense strand sequence comprises the nucleotide sequence of SEQ ID NO: 4924; and the sense strand sequence comprises the nucleotide sequence of SEQ ID NO: 4942;
[0183] (ix) the antisense strand sequence comprises the nucleotide sequence of SEQ ID NO: 5057; and the sense strand sequence comprises the nucleotide sequence of SEQ ID NO: 5060;
[0184] (x) the antisense strand sequence comprises the nucleotide sequence of SEQ ID NO: 4908; and the sense strand sequence comprises the nucleotide sequence of SEQ ID NO: 4946;
[0185] (xi) the antisense strand sequence comprises the nucleotide sequence of SEQ ID NO: 4912; and the sense strand sequence comprises the nucleotide sequence of SEQ ID NO: 4950;
[0186] (xii) the antisense strand sequence comprises the nucleotide sequence of SEQ ID NO: 4916; and the sense strand sequence comprises the nucleotide sequence of SEQ ID NO: 4954;
[0187] (xiii) the antisense strand sequence comprises the nucleotide sequence of SEQ ID NO: 4920; and the sense strand sequence comprises the nucleotide sequence of SEQ ID NO: 4958;
[0188] (xiv) the antisense strand sequence comprises the nucleotide sequence of SEQ ID NO: 4924; and the sense strand sequence comprises the nucleotide sequence of SEQ ID NO: 4962;
[0189] (xv) the antisense strand sequence comprises the nucleotide sequence of SEQ ID NO: 5057; and the sense strand sequence comprises the nucleotide sequence of SEQ ID NO: 5064;
[0190] (xvi) the antisense strand sequence comprises the nucleotide sequence of SEQ ID NO: 4916; and the sense strand sequence comprises the nucleotide sequence of SEQ ID NO: 4974;
[0191] (xvii) the antisense strand sequence comprises the nucleotide sequence of SEQ ID NO: 5057; and the sense strand sequence comprises the nucleotide sequence of SEQ ID NO: 5066;
[0192] (xviii) the antisense strand sequence comprises the nucleotide sequence of SEQ ID NO: 4908; and the sense strand sequence comprises the nucleotide sequence of SEQ ID NO: 4986;
[0193] (xix) the antisense strand sequence comprises the nucleotide sequence of SEQ ID NO: 4912; and the sense strand sequence comprises the nucleotide sequence of SEQ ID NO: 4990;
[0194] (xx) the antisense strand sequence comprises the nucleotide sequence of SEQ ID NO: 4916; and the sense strand sequence comprises the nucleotide sequence of SEQ ID NO: 4994;
[0195] (xxi) the antisense strand sequence comprises the nucleotide sequence of SEQ ID NO: 4920; and the sense strand sequence comprises the nucleotide sequence of SEQ ID NO: 4998;
[0196] (xxii) the antisense strand sequence comprises the nucleotide sequence of SEQ ID NO: 4924; and the sense strand sequence comprises the nucleotide sequence of SEQ ID NO: 5002;
[0197] (xxiii) the antisense strand sequence comprises the nucleotide sequence of SEQ ID NO: 5057; and the sense strand sequence comprises the nucleotide sequence of SEQ ID NO: 5070;
[0198] (xxiv) the antisense strand sequence comprises the nucleotide sequence of SEQ ID NO: 4908; and the sense strand sequence comprises the nucleotide sequence of SEQ ID NO: 5006;
[0199] (xxv) the antisense strand sequence comprises the nucleotide sequence of SEQ ID NO: 4912; and the sense strand sequence comprises the nucleotide sequence of SEQ ID NO: 5010;
[0200] (xxvi) the antisense strand sequence comprises the nucleotide sequence of SEQ ID NO: 4916; and the sense strand sequence comprises the nucleotide sequence of SEQ ID NO: 5014;
[0201] (xxvii) the antisense strand sequence comprises the nucleotide sequence of SEQ ID NO: 4920; and the sense strand sequence comprises the nucleotide sequence of SEQ ID NO: 4958;
[0202] (xxviii) the antisense strand sequence comprises the nucleotide sequence of SEQ ID NO: 4924; and the sense strand sequence comprises the nucleotide sequence of SEQ ID NO: 5022;
[0203] (xxvii) the antisense strand sequence comprises the nucleotide sequence of SEQ ID NO: 5057; and the sense strand sequence comprises the nucleotide sequence of SEQ ID NO: 5074;
[0204] (xxix) the antisense strand sequence comprises the nucleotide sequence of SEQ ID NO: 5080; and the sense strand sequence comprises the nucleotide sequence of SEQ ID NO: 5077;
[0205] (xxx) the antisense strand sequence comprises the nucleotide sequence of SEQ ID NO: 5080; and the sense strand sequence comprises the nucleotide sequence of SEQ ID NO: 5084;
[0206] (xxxi) the antisense strand sequence comprises the nucleotide sequence of SEQ ID NO: 5080; and the sense strand sequence comprises the nucleotide sequence of SEQ ID NO: 5088;
[0207] (xxxii) the antisense strand sequence comprises the nucleotide sequence of SEQ ID NO: 5080; and the sense strand sequence comprises the nucleotide sequence of SEQ ID NO: 5092;
[0208] (xxxiii) the antisense strand sequence comprises the nucleotide sequence of SEQ ID NO: 5080; and the sense strand sequence comprises the nucleotide sequence of SEQ ID NO: 5096;
[0209] (xxxiv) the antisense strand sequence comprises the nucleotide sequence of SEQ ID NO: 5080; and the sense strand sequence comprises the nucleotide sequence of SEQ ID NO: 5098;
[0210] (xxxv) the antisense strand sequence comprises the nucleotide sequence of SEQ ID NO: 5104; and the sense strand sequence comprises the nucleotide sequence of SEQ ID NO: 5101;
[0211] (xxxvi) the antisense strand sequence comprises the nucleotide sequence of SEQ ID NO: 5104; and the sense strand sequence comprises the nucleotide sequence of SEQ ID NO: 5108;
[0212] (xxxvii) the antisense strand sequence comprises the nucleotide sequence of SEQ ID NO: 5104; and the sense strand sequence comprises the nucleotide sequence of SEQ ID NO: 5112;
[0213] (xxxviii) the antisense strand sequence comprises the nucleotide sequence of SEQ ID NO: 5104; and the sense strand sequence comprises the nucleotide sequence of SEQ ID NO: 5116;
[0214] (xxxix) the antisense strand sequence comprises the nucleotide sequence of SEQ ID NO: 5104; and the sense strand sequence comprises the nucleotide sequence of SEQ ID NO: 5120;
[0215] (xl) the antisense strand sequence comprises the nucleotide sequence of SEQ ID NO: 5104; and the sense strand sequence comprises the nucleotide sequence of SEQ ID NO: 5122;
[0216] (xli) the antisense strand sequence comprises the nucleotide sequence of SEQ ID NO: 5128; and the sense strand sequence comprises the nucleotide sequence of SEQ ID NO: 5125;
[0217] (xlii) the antisense strand sequence comprises the nucleotide sequence of SEQ ID NO: 5128; and the sense strand sequence comprises the nucleotide sequence of SEQ ID NO: 5132;
[0218] (xliii) the antisense strand sequence comprises the nucleotide sequence of SEQ ID NO: 5128; and the sense strand sequence comprises the nucleotide sequence of SEQ ID NO: 5136;
[0219] (xlv) the antisense strand sequence comprises the nucleotide sequence of SEQ ID NO: 5128; and the sense strand sequence comprises the nucleotide sequence of SEQ ID NO: 5140;
[0220] (xliv) the antisense strand sequence comprises the nucleotide sequence of SEQ ID NO: 5128; and the sense strand sequence comprises the nucleotide sequence of SEQ ID NO: 5144; or
[0221] (xlvi) the antisense strand sequence comprises the nucleotide sequence of SEQ ID NO: 5128; and the sense strand sequence comprises the nucleotide sequence of SEQ ID NO: 5146.
   47. The siRNA of any one of embodiments 1-11 or 13-46 or the AAV viral genome of any one of embodiments 12-46, wherein:
[0222] (i) the antisense strand sequence comprises the nucleotide sequence of SEQ ID NO: 4700 and the sense strand sequence comprises the nucleotide sequence of any one of SEQ ID NOs: 4502-4505;
[0223] (ii) the antisense strand sequence comprises the nucleotide sequence of SEQ ID NO: 4920 and the sense strand sequence comprises the nucleotide sequence of any one of SEQ ID NOs: 4918, 4938, 4958, 4978, or 4998;
[0224] (iii) the antisense strand sequence comprises the nucleotide sequence of SEQ ID NO: 4697 and the sense strand sequence comprises the nucleotide sequence of any one of SEQ ID NOs: 4495-4499;
[0225] (iv) the antisense strand sequence comprises the nucleotide sequence of SEQ ID NO: 4908 and the sense strand sequence comprises the nucleotide sequence of any one of SEQ ID NOs: 4906, 4926, 4946, 4966, 4986, or 5006;
[0226] (v) the antisense strand sequence comprises at least 15, 16, 17, 18, or 19 contiguous nucleotides from the nucleotide sequence of SEQ ID NO: 4690 and the sense strand sequence comprises at least 15, 16, 17, 18, or 19 contiguous nucleotides from the nucleotide sequence of any one of SEQ ID NOs: 4480-4484;
[0227] (vi) the antisense strand sequence comprises the nucleotide sequence of SEQ ID NO: 4924 and the sense strand sequence comprises the nucleotide sequence of any one of SEQ ID NOs: 4922, 4942, 4962, 4982, 5002, or 5022;
[0228] (vii) the antisense strand sequence comprises the nucleotide sequence of SEQ ID NO: 4694 and the sense strand sequence comprises the nucleotide sequence of SEQ ID NO: 4492;
[0229] (viii) the antisense strand sequence comprises the nucleotide sequence of SEQ ID NO: 4691 and the sense strand sequence comprises the nucleotide sequence of any one of SEQ ID NOs: 4485-4489;
[0230] (ix) the antisense strand sequence comprises the nucleotide sequence of SEQ ID NO: 4916 and the sense strand sequence comprises the nucleotide sequence of any one of SEQ ID NOs: 4914, 4934, 4954, 4974, 4994, or 5014;
[0231] (x) the antisense strand sequence comprises the nucleotide sequence of SEQ ID NO: 4701 and the sense strand sequence comprises the nucleotide sequence of any one of SEQ ID NOs: 4506-4510;
[0232] (xi) the antisense strand sequence comprises the nucleotide sequence of SEQ ID NO: 4912 and the sense strand sequence comprises the nucleotide sequence of any one of SEQ ID NOs: 4910, 4930, 4950, 4970, 4990, or 5010;
[0233] (xii) the antisense strand sequence comprises the nucleotide sequence of SEQ ID NO: 4687 and the sense strand sequence comprises the nucleotide sequence of SEQ ID NO: 4477;
[0234] (xiii) the antisense strand sequence comprises the nucleotide sequence of SEQ ID NO: 4712 and the sense strand sequence comprises the nucleotide sequence of SEQ ID NO: 4521;
[0235] (xiv) the antisense strand sequence comprises the nucleotide sequence of SEQ ID NO: 4696 and the sense strand sequence comprises the nucleotide sequence of SEQ ID NO: 4494; or
[0236] (xv) the antisense strand sequence comprises the nucleotide sequence of SEQ ID NO: 4718 and the sense strand sequence comprises the nucleotide sequence of SEQ ID NO: 4527.
   48. The siRNA of any one of embodiments 1-11 or 13-47 or the AAV viral genome of any one of embodiments 12-47, wherein
[0237] (i) the nucleotide sequence encoding the sense strand sequence comprises the nucleotide sequence of SEQ ID NO: 4420 and the nucleotide sequence encoding the antisense strand comprises the nucleotide sequence of SEQ ID NO: 4434;
[0238] (ii) the nucleotide sequence encoding the sense strand sequence comprises the nucleotide sequence of SEQ ID NO: 4905 and the nucleotide sequence encoding the antisense strand comprises the nucleotide sequence of SEQ ID NO: 4907;
[0239] (iii) the nucleotide sequence encoding the sense strand sequence comprises the nucleotide sequence of SEQ ID NO: 4421 and the nucleotide sequence encoding the antisense strand comprises the nucleotide sequence of SEQ ID NO: 4435;
[0240] (iv) the nucleotide sequence encoding the sense strand sequence comprises the nucleotide sequence of SEQ ID NO: 4909 and the nucleotide sequence encoding the antisense strand comprises the nucleotide sequence of SEQ ID NO: 4911;
[0241] (v) the nucleotide sequence encoding the sense strand sequence comprises the nucleotide sequence of SEQ ID NO: 4422 and the nucleotide sequence encoding the antisense strand comprises the nucleotide sequence of SEQ ID NO: 4436;
[0242] (vi) the nucleotide sequence encoding the sense strand sequence comprises the nucleotide sequence of SEQ ID NO: 4913 and the nucleotide sequence encoding the antisense strand comprises the nucleotide sequence of SEQ ID NO: 4915;
[0243] (vii) the nucleotide sequence encoding the sense strand sequence comprises the nucleotide sequence of SEQ ID NO: 4423 and the nucleotide sequence encoding the antisense strand comprises the nucleotide sequence of SEQ ID NO: 4437;
[0244] (viii) the nucleotide sequence encoding the sense strand sequence comprises the nucleotide sequence of SEQ ID NO: 4917 and the nucleotide sequence encoding the antisense strand comprises the nucleotide sequence of SEQ ID NO: 4919;
[0245] (ix) the nucleotide sequence encoding the sense strand sequence comprises the nucleotide sequence of SEQ ID NO: 4424 and the nucleotide sequence encoding the antisense strand comprises the nucleotide sequence of SEQ ID NO: 4438;
[0246] (x) the nucleotide sequence encoding the sense strand sequence comprises the nucleotide sequence of SEQ ID NO: 4921 and the nucleotide sequence encoding the antisense strand comprises the nucleotide sequence of SEQ ID NO: 4923;
[0247] (xi) the nucleotide sequence encoding the sense strand sequence comprises the nucleotide sequence of SEQ ID NO: 4410 and the nucleotide sequence encoding the antisense strand comprises the nucleotide sequence of SEQ ID NO: 4434;
[0248] (xii) the nucleotide sequence encoding the sense strand sequence comprises the nucleotide sequence of SEQ ID NO: 4925 and the nucleotide sequence encoding the antisense strand comprises the nucleotide sequence of SEQ ID NO: 4907;
[0249] (xiii) the nucleotide sequence encoding the sense strand sequence comprises the nucleotide sequence of SEQ ID NO: 4411 and the nucleotide sequence encoding the antisense strand comprises the nucleotide sequence of SEQ ID NO: 4435;
[0250] (xiv) the nucleotide sequence encoding the sense strand sequence comprises the nucleotide sequence of SEQ ID NO: 4929 and the nucleotide sequence encoding the antisense strand comprises the nucleotide sequence of SEQ ID NO: 4911;
[0251] (xv) the nucleotide sequence encoding the sense strand sequence comprises the nucleotide sequence of SEQ ID NO: 4412 and the nucleotide sequence encoding the antisense strand comprises the nucleotide sequence of SEQ ID NO: 4436;
[0252] (xvi) the nucleotide sequence encoding the sense strand sequence comprises the nucleotide sequence of SEQ ID NO: 4933 and the nucleotide sequence encoding the antisense strand comprises the nucleotide sequence of SEQ ID NO: 4915;
[0253] (xvii) the nucleotide sequence encoding the sense strand sequence comprises the nucleotide sequence of SEQ ID NO: 4413 and the nucleotide sequence encoding the antisense strand comprises the nucleotide sequence of SEQ ID NO: 4437;
[0254] (xviii) the nucleotide sequence encoding the sense strand sequence comprises the nucleotide sequence of SEQ ID NO: 4937 and the nucleotide sequence encoding the antisense strand comprises the nucleotide sequence of SEQ ID NO: 4419;
[0255] (xix) the nucleotide sequence encoding the sense strand sequence comprises the nucleotide sequence of SEQ ID NO: 4414 and the nucleotide sequence encoding the antisense strand comprises the nucleotide sequence of SEQ ID NO: 4438;
[0256] (xx) the nucleotide sequence encoding the sense strand sequence comprises the nucleotide sequence of SEQ ID NO: 4941 and the nucleotide sequence encoding the antisense strand comprises the nucleotide sequence of SEQ ID NO: 4923;
[0257] (xxi) the nucleotide sequence encoding the sense strand sequence comprises the nucleotide sequence of SEQ ID NO: 4415 and the nucleotide sequence encoding the antisense strand comprises the nucleotide sequence of SEQ ID NO: 4434;
[0258] (xxii) the nucleotide sequence encoding the sense strand sequence comprises the nucleotide sequence of SEQ ID NO: 4945 and the nucleotide sequence encoding the antisense strand comprises the nucleotide sequence of SEQ ID NO: 4907;
[0259] (xxiii) the nucleotide sequence encoding the sense strand sequence comprises the nucleotide sequence of SEQ ID NO: 4416 and the nucleotide sequence encoding the antisense strand comprises the nucleotide sequence of SEQ ID NO: 4435;
[0260] (xxiv) the nucleotide sequence encoding the sense strand sequence comprises the nucleotide sequence of SEQ ID NO: 4949 and the nucleotide sequence encoding the antisense strand comprises the nucleotide sequence of SEQ ID NO: 4911;
[0261] (xxv) the nucleotide sequence encoding the sense strand sequence comprises the nucleotide sequence of SEQ ID NO: 4417 and the nucleotide sequence encoding the antisense strand comprises the nucleotide sequence of SEQ ID NO: 4436;
[0262] (xxvi) the nucleotide sequence encoding the sense strand sequence comprises the nucleotide sequence of SEQ ID NO: 4953 and the nucleotide sequence encoding the antisense strand comprises the nucleotide sequence of SEQ ID NO: 4915;
[0263] (xxvii) the nucleotide sequence encoding the sense strand sequence comprises the nucleotide sequence of SEQ ID NO: 4418 and the nucleotide sequence encoding the antisense strand comprises the nucleotide sequence of SEQ ID NO: 4437;
[0264] (xxviii) the nucleotide sequence encoding the sense strand sequence comprises the nucleotide sequence of SEQ ID NO: 4957 and the nucleotide sequence encoding the antisense strand comprises the nucleotide sequence of SEQ ID NO: 4919;
[0265] (xxix) the nucleotide sequence encoding the sense strand sequence comprises the nucleotide sequence of SEQ ID NO: 4419 and the nucleotide sequence encoding the antisense strand comprises the nucleotide sequence of SEQ ID NO: 4438;
[0266] (xxx) the nucleotide sequence encoding the sense strand sequence comprises the nucleotide sequence of SEQ ID NO: 4961 and the nucleotide sequence encoding the antisense strand comprises the nucleotide sequence of SEQ ID NO: 4923;
[0267] (xxxi) the nucleotide sequence encoding the sense strand sequence comprises the nucleotide sequence of SEQ ID NO: 4420 and the nucleotide sequence encoding the antisense strand comprises the nucleotide sequence of SEQ ID NO: 4434;
[0268] (xxxii) the nucleotide sequence encoding the sense strand sequence comprises the nucleotide sequence of SEQ ID NO: 4965 and the nucleotide sequence encoding the antisense strand comprises the nucleotide sequence of SEQ ID NO: 4907;
[0269] (xxxii) the nucleotide sequence encoding the sense strand sequence comprises the nucleotide sequence of SEQ ID NO: 4421 and the nucleotide sequence encoding the antisense strand comprises the nucleotide sequence of SEQ ID NO: 4435;
[0270] (xxxiii) the nucleotide sequence encoding the sense strand sequence comprises the nucleotide sequence of SEQ ID NO: 4969 and the nucleotide sequence encoding the antisense strand comprises the nucleotide sequence of SEQ ID NO: 4911;
[0271] (xxxiv) the nucleotide sequence encoding the sense strand sequence comprises the nucleotide sequence of SEQ ID NO: 4422 and the nucleotide sequence encoding the antisense strand comprises the nucleotide sequence of SEQ ID NO: 4436;
[0272] (xxxv) the nucleotide sequence encoding the sense strand sequence comprises the nucleotide sequence of SEQ ID NO: 4973 and the nucleotide sequence encoding the antisense strand comprises the nucleotide sequence of SEQ ID NO: 4915;
[0273] (xxxvi) the nucleotide sequence encoding the sense strand sequence comprises the nucleotide sequence of SEQ ID NO: 4423 and the nucleotide sequence encoding the antisense strand comprises the nucleotide sequence of SEQ ID NO: 4437;
[0274] (xxxvii) the nucleotide sequence encoding the sense strand sequence comprises the nucleotide sequence of SEQ ID NO: 4977 and the nucleotide sequence encoding the antisense strand comprises the nucleotide sequence of SEQ ID NO: 4919;
[0275] (xxxviii) the nucleotide sequence encoding the sense strand sequence comprises the nucleotide sequence of SEQ ID NO: 4424 and the nucleotide sequence encoding the antisense strand comprises the nucleotide sequence of SEQ ID NO: 4438;
[0276] (xxxix) the nucleotide sequence encoding the sense strand sequence comprises the nucleotide sequence of SEQ ID NO: 498I and the nucleotide sequence encoding the antisense strand comprises the nucleotide sequence of SEQ ID NO: 4923;
[0277] (xl) the nucleotide sequence encoding the sense strand sequence comprises the nucleotide sequence of SEQ ID NO: 4425 and the nucleotide sequence encoding the antisense strand comprises the nucleotide sequence of SEQ ID NO: 4434;
[0278] (xli) the nucleotide sequence encoding the sense strand sequence comprises the nucleotide sequence of SEQ ID NO: 4985 and the nucleotide sequence encoding the antisense strand comprises the nucleotide sequence of SEQ ID NO: 4907;
[0279] (xlii) the nucleotide sequence encoding the sense strand sequence comprises the nucleotide sequence of SEQ ID NO: 4426 and the nucleotide sequence encoding the antisense strand comprises the nucleotide sequence of SEQ ID NO: 4435;
[0280] (xliii) the nucleotide sequence encoding the sense strand sequence comprises the nucleotide sequence of SEQ ID NO: 4989 and the nucleotide sequence encoding the antisense strand comprises the nucleotide sequence of SEQ ID NO: 4911;
[0281] (xliv) the nucleotide sequence encoding the sense strand sequence comprises the nucleotide sequence of SEQ ID NO: 4427 and the nucleotide sequence encoding the antisense strand comprises the nucleotide sequence of SEQ ID NO: 4436;
[0282] (xlv) the nucleotide sequence encoding the sense strand sequence comprises the nucleotide sequence of SEQ ID NO: 4993 and the nucleotide sequence encoding the antisense strand comprises the nucleotide sequence of SEQ ID NO: 4915;
[0283] (xlvi) the nucleotide sequence encoding the sense strand sequence comprises the nucleotide sequence of SEQ ID NO: 4428 and the nucleotide sequence encoding the antisense strand comprises the nucleotide sequence of SEQ ID NO: 4437;
[0284] (xlvii) the nucleotide sequence encoding the sense strand sequence comprises the nucleotide sequence of SEQ ID NO: 4997 and the nucleotide sequence encoding the antisense strand comprises the nucleotide sequence of SEQ ID NO: 4919;
[0285] (xlviii) the nucleotide sequence encoding the sense strand sequence comprises the nucleotide sequence of SEQ ID NO: 4429 and the nucleotide sequence encoding the antisense strand comprises the nucleotide sequence of SEQ ID NO: 4438;
[0286] (xlix) the nucleotide sequence encoding the sense strand sequence comprises the nucleotide sequence of SEQ ID NO: 5001 and the nucleotide sequence encoding the antisense strand comprises the nucleotide sequence of SEQ ID NO: 4923;
[0287] (l) the nucleotide sequence encoding the sense strand sequence comprises the nucleotide sequence of SEQ ID NO: 4430 and the nucleotide sequence encoding the antisense strand comprises the nucleotide sequence of SEQ ID NO: 4434;
[0288] (li) the nucleotide sequence encoding the sense strand sequence comprises the nucleotide sequence of SEQ ID NO: 5005 and the nucleotide sequence encoding the antisense strand comprises the nucleotide sequence of SEQ ID NO: 4907;
[0289] (lii) the nucleotide sequence encoding the sense strand sequence comprises the nucleotide sequence of SEQ ID NO: 4431 and the nucleotide sequence encoding the antisense strand comprises the nucleotide sequence of SEQ ID NO: 4435;
[0290] (liii) the nucleotide sequence encoding the sense strand sequence comprises the nucleotide sequence of SEQ ID NO: 5009 and the nucleotide sequence encoding the antisense strand comprises the nucleotide sequence of SEQ ID NO: 4911;
[0291] (liv) the nucleotide sequence encoding the sense strand sequence comprises the nucleotide sequence of SEQ ID NO: 4432 and the nucleotide sequence encoding the antisense strand comprises the nucleotide sequence of SEQ ID NO: 4436;
[0292] (lv) the nucleotide sequence encoding the sense strand sequence comprises the nucleotide sequence of SEQ ID NO: 5013 and the nucleotide sequence encoding the antisense strand comprises the nucleotide sequence of SEQ ID NO: 4915;
[0293] (lvi) the nucleotide sequence encoding the sense strand sequence comprises the nucleotide sequence of SEQ ID NO: 4433 and the nucleotide sequence encoding the antisense strand comprises the nucleotide sequence of SEQ ID NO: 4438;
[0294] (lvii) the nucleotide sequence encoding the sense strand sequence comprises the nucleotide sequence of SEQ ID NO: 5021 and the nucleotide sequence encoding the antisense strand comprises the nucleotide sequence of SEQ ID NO: 4923;
[0295] (lviii) the nucleotide sequence encoding the sense strand sequence comprises the nucleotide sequence of SEQ ID NO: 5053 and the nucleotide sequence encoding the antisense strand comprises the nucleotide sequence of SEQ ID NO: 5056;
[0296] (lix) the nucleotide sequence encoding the sense strand sequence comprises the nucleotide sequence of SEQ ID NO: 5059 and the nucleotide sequence encoding the antisense strand comprises the nucleotide sequence of SEQ ID NO: 5056;
[0297] (lx) the nucleotide sequence encoding the sense strand sequence comprises the nucleotide sequence of SEQ ID NO: 5063 and the nucleotide sequence encoding the antisense strand comprises the nucleotide sequence of SEQ ID NO: 5056;
[0298] (lxi) the nucleotide sequence encoding the sense strand sequence comprises the nucleotide sequence of SEQ ID NO: 5065 and the nucleotide sequence encoding the antisense strand comprises the nucleotide sequence of SEQ ID NO: 5056;
[0299] (lxii) the nucleotide sequence encoding the sense strand sequence comprises the nucleotide sequence of SEQ ID NO: 5069 and the nucleotide sequence encoding the antisense strand comprises the nucleotide sequence of SEQ ID NO: 5056;
[0300] (lxiii) the nucleotide sequence encoding the sense strand sequence comprises the nucleotide sequence of SEQ ID NO: 5073 and the nucleotide sequence encoding the antisense strand comprises the nucleotide sequence of SEQ ID NO: 5056;
[0301] (lxiv) the nucleotide sequence encoding the sense strand sequence comprises the nucleotide sequence of SEQ ID NO: 5076 and the nucleotide sequence encoding the antisense strand comprises the nucleotide sequence of SEQ ID NO: 5079;
[0302] (lxv) the nucleotide sequence encoding the sense strand sequence comprises the nucleotide sequence of SEQ ID NO: 5083 and the nucleotide sequence encoding the antisense strand comprises the nucleotide sequence of SEQ ID NO: 5079;
[0303] (lxvi) the nucleotide sequence encoding the sense strand sequence comprises the nucleotide sequence of SEQ ID NO: 5087 and the nucleotide sequence encoding the antisense strand comprises the nucleotide sequence of SEQ ID NO: 5079;
[0304] (lxvii) the nucleotide sequence encoding the sense strand sequence comprises the nucleotide sequence of SEQ ID NO: 5091 and the nucleotide sequence encoding the antisense strand comprises the nucleotide sequence of SEQ ID NO: 5079;
[0305] (lxviii) the nucleotide sequence encoding the sense strand sequence comprises the nucleotide sequence of SEQ ID NO: 5095 and the nucleotide sequence encoding the antisense strand comprises the nucleotide sequence of SEQ ID NO: 5079;
[0306] (lxix) the nucleotide sequence encoding the sense strand sequence comprises the nucleotide sequence of SEQ ID NO: 5097 and the nucleotide sequence encoding the antisense strand comprises the nucleotide sequence of SEQ ID NO: 5079;
[0307] (lxx) the nucleotide sequence encoding the sense strand sequence comprises the nucleotide sequence of SEQ ID NO: 5100 and the nucleotide sequence encoding the antisense strand comprises the nucleotide sequence of SEQ ID NO: 5103;
[0308] (lxxi) the nucleotide sequence encoding the sense strand sequence comprises the nucleotide sequence of SEQ ID NO: 5107 and the nucleotide sequence encoding the antisense strand comprises the nucleotide sequence of SEQ ID NO: 5103;
[0309] (lxxii) the nucleotide sequence encoding the sense strand sequence comprises the nucleotide sequence of SEQ ID NO: 5111 and the nucleotide sequence encoding the antisense strand comprises the nucleotide sequence of SEQ ID NO: 5103;
[0310] (lxxiii) the nucleotide sequence encoding the sense strand sequence comprises the nucleotide sequence of SEQ ID NO: 5115 and the nucleotide sequence encoding the antisense strand comprises the nucleotide sequence of SEQ ID NO: 5103;
[0311] (lxxiv) the nucleotide sequence encoding the sense strand sequence comprises the nucleotide sequence of SEQ ID NO: 5119 and the nucleotide sequence encoding the antisense strand comprises the nucleotide sequence of SEQ ID NO: 5103;
[0312] (lxxv) the nucleotide sequence encoding the sense strand sequence comprises the nucleotide sequence of SEQ ID NO: 5121 and the nucleotide sequence encoding the antisense strand comprises the nucleotide sequence of SEQ ID NO: 5103;
[0313] (lxxvi) the nucleotide sequence encoding the sense strand sequence comprises the nucleotide sequence of SEQ ID NO: 5124 and the nucleotide sequence encoding the antisense strand comprises the nucleotide sequence of SEQ ID NO: 5127;
[0314] (lxxvii) the nucleotide sequence encoding the sense strand sequence comprises the nucleotide sequence of SEQ ID NO: 5131 and the nucleotide sequence encoding the antisense strand comprises the nucleotide sequence of SEQ ID NO: 5127;
[0315] (lxxviii) the nucleotide sequence encoding the sense strand sequence comprises the nucleotide sequence of SEQ ID NO: 5135 and the nucleotide sequence encoding the antisense strand comprises the nucleotide sequence of SEQ ID NO: 5127;
[0316] (lxxix) the nucleotide sequence encoding the sense strand sequence comprises the nucleotide sequence of SEQ ID NO: 5139 and the nucleotide sequence encoding the antisense strand comprises the nucleotide sequence of SEQ ID NO: 5127;
[0317] (lxxx) the nucleotide sequence encoding the sense strand sequence comprises the nucleotide sequence of SEQ ID NO: 5143 and the nucleotide sequence encoding the antisense strand comprises the nucleotide sequence of SEQ ID NO: 5127; or
[0318] (lxxxi) the nucleotide sequence encoding the sense strand sequence comprises the nucleotide sequence of SEQ ID NO: 5145 and the nucleotide sequence encoding the antisense strand comprises the nucleotide sequence of SEQ ID NO: 5127.
   49. The siRNA of any one of embodiments 1-11, 13, 25-28, 36-39, 47, or 48, or the AAV viral genome of any one of embodiments 11-17, 25-28, 36-39, or 47, or 48, wherein the nucleotide sequence encoding the antisense strand sequence comprises the nucleotide sequence of SEQ ID NO: 4907 and the nucleotide sequence encoding the sense strand sequence comprises the nucleotide sequence of SEQ ID NO: 4905.
   50. The siRNA of any one of embodiments 1-11, 13, 25-27, 29, 36-39, 47, or 48 or the AAV viral genome of any one of embodiments 11-16, 18, 25-27, 29, 36-39, 47, or 48, wherein the nucleotide sequence encoding the antisense strand sequence comprises the nucleotide sequence of SEQ ID NO: 4919 and the nucleotide sequence encoding the sense strand sequence comprises the nucleotide sequence of SEQ ID NO: 4917.
   51. The siRNA of any one of embodiments 1-11, 13, 25-27, 30, 36-39, 47, or 48 or the AAV viral genome of any one of embodiments 11-16, 19, 25-27, 30, 36-39, 47, or 48, wherein the nucleotide sequence encoding the antisense strand sequence comprises the nucleotide sequence of SEQ ID NO: 4923 and the nucleotide sequence encoding the sense strand sequence comprises the nucleotide sequence of SEQ ID NO: 4921.
   52. The siRNA of any one of embodiments 1-11, 13, 25-27, 31, 36-39, 47, or 48 or the AAV viral genome of any one of embodiments 11-16, 19, 25-27, 31, 36-39, 47, or 48, wherein the nucleotide sequence encoding the antisense strand sequence comprises the nucleotide sequence of SEQ ID NO: 4907 and the nucleotide sequence encoding the sense strand sequence comprises the nucleotide sequence of SEQ ID NO: 4965.
   53. The siRNA of any one of embodiments 1-11, 13, 25-27, 32, 36-39, 47, or 48 or the AAV viral genome of any one of embodiments 11-16, 19, 25-27, 62, 36-39, 47, or 48, wherein the nucleotide sequence encoding the antisense strand sequence comprises the nucleotide sequence of SEQ ID NO: 4911 and the nucleotide sequence encoding the sense strand sequence comprises the nucleotide sequence of SEQ ID NO: 4969.
   54. The siRNA of any one of embodiments 1-11, 13, 25-27, 33, 36-39, 47, or 48 or the AAV viral genome of any one of embodiments 11-16, 19, 25-27, 33, 36-39, 47, or 48, wherein the nucleotide sequence encoding the antisense strand sequence comprises the nucleotide sequence of SEQ ID NO: 4919 and the nucleotide sequence encoding the sense strand sequence comprises the nucleotide sequence of SEQ ID NO: 4977.
   55. The siRNA of any one of embodiments 1-11, 13, 25-27, 34, 36-39, 47, or 48 or the AAV viral genome of any one of embodiments 11-16, 19, 25-27, 34, 36-39, 47, or 48, wherein the nucleotide sequence encoding the antisense strand sequence comprises the nucleotide sequence of SEQ ID NO: 4923 and the nucleotide sequence encoding the sense strand sequence comprises the nucleotide sequence of SEQ ID NO: 498I.
   56. The siRNA of any one of embodiments 1-11 or 13-55, or the AAV viral genome of any one of embodiments 12-55, wherein the sense strand sequence, the antisense strand sequence, or both the sense strand sequence and the antisense strand sequence comprise at least 15-30, 19-21, or 25-30 nucleotides in length, e.g., 17, 18, 20, 21, 22, 25, or 30 nucleotides in length.
   57. The siRNA of any one of embodiments 1-11 or 13-56 or the AAV viral genome of any one of embodiments 12-56, wherein the sense strand sequence, the antisense strand sequence, or both the sense strand sequence and the antisense strand sequence comprise an overhang, e.g., an overhang at the 5′ end of the sense strand sequence and/or at the 3′ end of the antisense strand sequence, of 1 or 2 nucleotides.
   58. The siRNA of any one of embodiments 1-11 or 13-57 or the AAV viral genome of any one of embodiments 12-57, wherein:
[0319] (i) the sense strand and the antisense strand comprise one mismatch; and/or
[0320] (ii) the antisense strand and the target sequence comprise one mismatch.
   59. A modulatory polynucleotide comprising the siRNA of any one of embodiments 1-12 or 13-58.
   60. The AAV viral genome of any one of embodiments 13-58, wherein the nucleotide sequence further encodes a modulatory polynucleotide comprising the sense strand sequence and the antisense strand sequence.
   61. The modulatory polynucleotide of embodiment 59, or the AAV viral genome of embodiment 60, wherein the modulatory polynucleotide further comprises one, two, three or all of:
[0321] (i) a 5′ flanking region;
[0322] (ii) a loop region; and
[0323] (iii) a 3′ flanking region.
   62. The modulatory polynucleotide of embodiment 61, or the AAV viral genome of embodiment 61, wherein:
[0324] (i) the 5′ flanking region comprises the nucleotide sequence of any one of SEQ ID NOs: 4878-4886; a nucleotide sequence at least 70%, 75%, 80%, 85%, 90%, 95% 96%, 97%, 98%, 99% identical thereto; a nucleotide sequence comprising one, two, three, four, five, six, or seven, but no more than ten different nucleotides relative to the nucleotide sequence of any of SEQ ID NOs: 4878-4886; or a nucleotide sequence comprising one, two, three, four, five, six, or seven, but no more than ten modifications relative to the nucleotide sequence of any of SEQ ID NOs: 4878-4886;
[0325] (ii) the loop region comprises the nucleotide sequence of any of SEQ ID NOs: 4887-4896; a nucleotide sequence at least 70%, 75%, 80%, 85%, 90%, 95% 96%, 97%, 98%, 99% identical thereto; a nucleotide sequence comprising one, two, three, or four, but no more than five different nucleotides relative to the nucleotide sequence of any of SEQ ID NOs: 4887-4896; or a nucleotide sequence comprising one, two, three, or four, but no more than five modifications relative to the nucleotide sequence of any of SEQ ID NOs: 4887-4896; and/or
[0326] (iii) the 3′ flanking region comprises the nucleotide sequence of any one of SEQ ID NOs: 4897-4904; a nucleotide sequence at least 70%, 75%, 80%, 85%, 90%, 95% 96%, 97%, 98%, 99% identical thereto; a nucleotide sequence comprising one, two, three, four, five, six, or seven, but no more than ten modifications relative to the nucleotide sequence of any of SEQ ID NOs: 4897-4904; or a nucleotide sequence comprising one, two, three, four, five, six, or seven, but no more than ten modifications relative to the nucleotide sequence of any of SEQ ID NOs: 4897-4904 63. The modulatory polynucleotide of embodiment 61 or 62 or the AAV viral genome of embodiment 61 or 62, wherein:
[0327] (i) the nucleotide sequence encoding the 5′ flanking region comprises the nucleotide sequence of any of SEQ ID NOs: 4353-4361, a nucleotide sequence at least 70%, 75%, 80%, 85%, 90%, 95% 96%, 97%, 98%, 99% identical thereto; a nucleotide sequence comprising one, two, three, four, five, six, or seven, but no more than ten different nucleotides relative to the nucleotide sequence of any of SEQ ID NOs: 4353-4361; or a nucleotide sequence comprising one, two, three, four, five, six, or seven, but no more than ten modifications relative to the nucleotide sequence of any of SEQ ID NOs: 4353-4361;
[0328] (ii) the nucleotide sequence encoding the loop region comprises the nucleotide sequence of any of SEQ ID NOs: 4362-4371; a nucleotide sequence at least 70%, 75%, 80%, 85%, 90%, 95% 96%, 97%, 98%, 99% identical thereto; a nucleotide sequence comprising one, two, three, or four, but no more than five different nucleotides relative to the nucleotide sequence of any of SEQ ID NOs: 4362-4371; or a nucleotide sequence comprising one, two, three, or four, but no more than five modifications relative to the nucleotide sequence of any of SEQ ID NOs: 4362-4371; and/or
[0329] (iii) the nucleotide sequence encoding the 3′ flanking region comprises the nucleotide sequence of any of SEQ ID NOs: 4372-4379; a nucleotide sequence at least 70%, 75%, 80%, 85%, 90%, 95% 96%, 97%, 98%, 99% identical thereto; a nucleotide sequence comprising one, two, three, four, five, six, or seven, but no more than ten different nucleotides relative to the nucleotide sequence of any of SEQ ID NOs: 4372-4379; or a nucleotide sequence comprising one, two, three, four, five, six, or seven, but no more than ten modifications relative to the nucleotide sequence of any of SEQ ID NOs: 4372-4379.
   64. The modulatory polynucleotide of any one of embodiments 59 or 61-63 or the AAV viral genome of any one of embodiments 60-63, wherein the modulatory polynucleotide comprises:
[0330] (i) a 5′ flanking region comprising the nucleotide sequence of SEQ ID NO: 4879, a nucleotide sequence at least 70%, 75%, 80%, 85%, 90%, 95% 96%, 97%, 98%, 99% identical to SEQ ID NO: 4879, a nucleotide sequence comprising one, two, three, four, five, six, or seven, but no more than ten different nucleotides relative to the nucleotide sequence of SEQ ID NO: 4879; or a nucleotide sequence comprising one, two, three, four, five, six, or seven, but no more than ten different nucleotides relative to the nucleotide sequence of SEQ ID NO: 4879;
[0331] (ii) a loop region comprising the nucleotide sequence of SEQ ID NO: 4887, a nucleotide sequence at least 70%, 75%, 80%, 85%, 90%, 95% 96%, 97%, 98%, 99% identical to SEQ ID NO: 4887, a nucleotide sequence comprising one, two, three, or four, but no more than five different nucleotides relative to the nucleotide sequence of SEQ ID NO: 4887; or a nucleotide sequence comprising one, two, three, or four, but no more than five different nucleotides relative to the nucleotide sequence of SEQ ID NO: 4887; and
[0332] (iii) a 3′ flanking region of SEQ ID NO: 4898, a nucleotide sequence at least 70%, 75%, 80%, 85%, 90%, 95% 96%, 97%, 98%, 99% identical to SEQ ID NO: 4898, a nucleotide sequence comprising one, two, three, four, five, six, or seven, but no more than ten different nucleotides relative to the nucleotide sequence of SEQ ID NO: 4898, a nucleotide sequence comprising one, two, three, four, five, six, or seven, but no more than ten modifications relative to the nucleotide sequence of SEQ ID NO: 4898.
   65. The modulatory polynucleotide of any one of embodiments 59 or 61-63 or the AAV viral genome of any one of embodiments 60-63, wherein the modulatory polynucleotide comprises:
[0333] (i) a 5′ flanking region comprising the nucleotide sequence of SEQ ID NO: 4879, a nucleotide sequence at least 70%, 75%, 80%, 85%, 90%, 95% 96%, 97%, 98%, 99% identical to SEQ ID NO: 4879, a nucleotide sequence comprising one, two, three, four, five, six, or seven, but no more than ten different nucleotides relative to the nucleotide sequence of SEQ ID NO: 4879; or a nucleotide sequence comprising one, two, three, four, five, six, or seven, but no more than ten modifications relative to the nucleotide sequence of SEQ ID NO: 4879;
[0334] (ii) a loop region comprising the nucleotide sequence of SEQ ID NO: 4888, a nucleotide sequence at least 70%, 75%, 80%, 85%, 90%, 95% 96%, 97%, 98%, 99% identical to SEQ ID NO: 4888, a nucleotide sequence comprising one, two, three, or four, but no more than five different nucleotides relative to the nucleotide sequence of SEQ ID NO: 4888; or a nucleotide sequence comprising one, two, three, or four, but no more than five modifications relative to the nucleotide sequence of SEQ ID NO: 4888; and
[0335] (iii) a 3′ flanking region of SEQ ID NO: 4898, a nucleotide sequence at least 70%, 75%, 80%, 85%, 90%, 95% 96%, 97%, 98%, 99% identical to SEQ ID NO: 4898, a nucleotide sequence comprising one, two, three, four, five, six, or seven, but no more than ten different nucleotides relative to the nucleotide sequence of SEQ ID NO: 4898, a nucleotide sequence comprising one, two, three, four, five, six, or seven, but no more than ten modifications relative to the nucleotide sequence of SEQ ID NO: 4898.
   66. The modulatory polynucleotide of any one of embodiments 59 or 61-63 or the AAV viral genome of any one of embodiments 60-63, wherein the modulatory polynucleotide comprises:
[0336] (i) a 5′ flanking region comprising the nucleotide sequence of SEQ ID NO: 4879, a nucleotide sequence at least 70%, 75%, 80%, 85%, 90%, 95% 96%, 97%, 98%, 99% identical to SEQ ID NO: 4879, a nucleotide sequence comprising one, two, three, four, five, six, or seven, but no more than ten different nucleotides relative to the nucleotide sequence of SEQ ID NO: 4879; or a nucleotide sequence comprising one, two, three, four, five, six, or seven, but no more than ten modifications relative to the nucleotide sequence of SEQ ID NO: 4879;
[0337] (ii) a loop region comprising the nucleotide sequence of SEQ ID NO: 4887, a nucleotide sequence at least 70%, 75%, 80%, 85%, 90%, 95% 96%, 97%, 98%, 99% identical to SEQ ID NO: 4887, a nucleotide sequence comprising one, two, three, or four, but no more than five different nucleotides relative to the nucleotide sequence of SEQ ID NO: 4887; or a nucleotide sequence comprising one, two, three, or four, but no more than five modifications relative to the nucleotide sequence of SEQ ID NO: 4887; and
[0338] (iii) a 3′ flanking region of SEQ ID NO: 4899, a nucleotide sequence at least 70%, 75%, 80%, 85%, 90%, 95% 96%, 97%, 98%, 99% identical to SEQ ID NO: 4899, a nucleotide sequence comprising one, two, three, four, five, six, or seven, but no more than ten different nucleotides relative to the nucleotide sequence of SEQ ID NO: 4899, a nucleotide sequence comprising one, two, three, four, five, six, or seven, but no more than ten modifications relative to the nucleotide sequence of SEQ ID NO: 4899.
   67. The modulatory polynucleotide of any one of embodiments 59 or 61-63 or the AAV viral genome of any one of embodiments 60-63, wherein the modulatory polynucleotide comprises:
[0339] (i) a 5′ flanking region comprising the nucleotide sequence of SEQ ID NO: 4880, a nucleotide sequence at least 70%, 75%, 80%, 85%, 90%, 95% 96%, 97%, 98%, 99% identical to SEQ ID NO: 4880, a nucleotide sequence comprising one, two, three, four, five, six, or seven, but no more than ten different nucleotides relative to the nucleotide sequence of SEQ ID NO: 4880; or a nucleotide sequence comprising one, two, three, four, five, six, or seven, but no more than ten modifications relative to the nucleotide sequence of SEQ ID NO: 4880;
[0340] (ii) a loop region comprising the nucleotide sequence of SEQ ID NO: 4891, a nucleotide sequence at least 70%, 75%, 80%, 85%, 90%, 95% 96%, 97%, 98%, 99% identical to SEQ ID NO: 4891, a nucleotide sequence comprising one, two, three, or four, but no more than five different nucleotides relative to the nucleotide sequence of SEQ ID NO: 4891; or a nucleotide sequence comprising one, two, three, or four, but no more than five modifications relative to the nucleotide sequence of SEQ ID NO: 4891; and
[0341] (iii) a 3′ flanking region of SEQ ID NO: 4900, a nucleotide sequence at least 70%, 75%, 80%, 85%, 90%, 95% 96%, 97%, 98%, 99% identical to SEQ ID NO: 4900, a nucleotide sequence comprising one, two, three, four, five, six, or seven, but no more than ten different nucleotides relative to the nucleotide sequence of SEQ ID NO: 4900, or a nucleotide sequence comprising one, two, three, four, five, six, or seven, but no more than ten modifications relative to SEQ ID NO: 4900.
   68. The modulatory polynucleotide of any one of embodiments 59 or 61-67 or the AAV viral genome of any one of embodiments 62-67, wherein the modulatory polynucleotide comprises in 5′ to 3′ order:
[0342] (i) the 5′ flanking region, sense strand sequence, loop region, antisense strand sequence, and 3′ flanking region; or
[0343] (ii) the 5′ flanking region, antisense strand sequence, loop region, sense strand sequence, and 3′ flanking region.
   69. The modulatory polynucleotide of any one of embodiments 59, 61-63, 67, 68 or the AAV viral genome of any one of embodiments 60-63, 67, 68, where the modulatory polynucleotide comprises:
[0344] (i) a 5′ flanking region comprising the nucleotide sequence of SEQ ID NO: 4880; a nucleotide sequence at least 70%, 75%, 80%, 85%, 90%, 95% 96%, 97%, 98%, 99% identical to SEQ ID NO: 4880; a nucleotide sequence comprising one, two, three, four, five, six, or seven, but no more than ten different nucleotides relative to the nucleotide sequence of SEQ ID NO: 4880; or a nucleotide sequence comprising one, two, three, four, five, six, or seven, but no more than ten modifications relative to the nucleotide sequence of SEQ ID NO: 4880;
[0345] (ii) the sense strand sequence of SEQ ID NO: 4906;
[0346] (iii) a loop region comprising the nucleotide sequence of SEQ ID NO: 4891; a nucleotide sequence at least 70%, 75%, 80%, 85%, 90%, 95% 96%, 97%, 98%, 99% identical to SEQ ID NO: 4891; a nucleotide sequence comprising one, two, three, or four, but no more than five different nucleotides relative to the nucleotide sequence of SEQ ID NO: 4891; or a nucleotide sequence comprising one, two, three, or four, but no more than five modifications relative to the nucleotide sequence of SEQ ID NO: 4891;
[0347] (iv) the antisense strand sequence of SEQ ID NO: 4908; and
[0348] (v) a 3′ flanking region comprising the nucleotide sequence of SEQ ID NO: 4900; a nucleotide sequence at least 70%, 75%, 80%, 85%, 90%, 95% 96%, 97%, 98%, 99% identical to SEQ ID NO: 4900; a nucleotide sequence comprising one, two, three, four, five, six, or seven, but no more than ten different nucleotides relative to the nucleotide sequence of SEQ ID NO: 4900; or a nucleotide sequence comprising one, two, three, four, five, six, or seven, but no more than ten modifications relative to SEQ ID NO: 4900.
   70. The modulatory polynucleotide of any one of embodiments 59, 61-63, or 67-69, or the AAV viral genome of any one of embodiments 60-63 or 67-69, where the nucleotide sequence encoding the modulatory polynucleotide comprises:
[0349] (i) a 5′ flanking region comprising the nucleotide sequence of SEQ ID NO: 4355; a nucleotide sequence at least 70%, 75%, 80%, 85%, 90%, 95% 96%, 97%, 98%, 99% identical to SEQ ID NO: 4355; a nucleotide sequence comprising one, two, three, four, five, six, or seven, but no more than ten different nucleotides relative to the nucleotide sequence of SEQ ID NO: 4355; or a nucleotide sequence comprising one, two, three, four, five, six, or seven, but no more than ten modifications relative to the nucleotide sequence of SEQ ID NO: 4355;
[0350] (ii) the sense strand sequence of SEQ ID NO: 4905;
[0351] (iii) a loop region comprising the nucleotide sequence of SEQ ID NO: 4366; a nucleotide sequence at least 70%, 75%, 80%, 85%, 90%, 95% 96%, 97%, 98%, 99% identical to SEQ ID NO: 4366; a nucleotide sequence comprising one, two, three, or four, but no more than five different nucleotides relative to the nucleotide sequence of SEQ ID NO: 4366; or a nucleotide sequence comprising one, two, three, or four, but no more than five modifications relative to the nucleotide sequence of SEQ ID NO: 4366;
[0352] (iv) the antisense strand sequence of SEQ ID NO: 4907; and
[0353] (v) a 3′ flanking region comprising the nucleotide sequence of SEQ ID NO: 4375; a nucleotide sequence at least 70%, 75%, 80%, 85%, 90%, 95% 96%, 97%, 98%, 99% identical to SEQ ID NO: 4375; a nucleotide sequence comprising one, two, three, four, five, six, or seven, but no more than ten different nucleotides relative to the nucleotide sequence of SEQ ID NO: 4375; or a nucleotide sequence comprising one, two, three, four, five, six, or seven, but no more than ten modifications relative to SEQ ID NO: 4375.
   71. The modulatory polynucleotide of any one of embodiments 59, 61-63, 67, or 68 or the AAV viral genome of any one of embodiments 60-63, 67, or 68, where the modulatory polynucleotide comprises:
[0354] (i) a 5′ flanking region comprising the nucleotide sequence of SEQ ID NO: 4880; a nucleotide sequence at least 70%, 75%, 80%, 85%, 90%, 95% 96%, 97%, 98%, 99% identical to SEQ ID NO: 4880; a nucleotide sequence comprising one, two, three, four, five, six, or seven, but no more than ten different nucleotides relative to the nucleotide sequence of SEQ ID NO: 4880; or a nucleotide sequence comprising one, two, three, four, five, six, or seven, but no more than ten modifications relative to the nucleotide sequence of SEQ ID NO: 4880;
[0355] (ii) the sense strand sequence of SEQ ID NO: 4918;
[0356] (iii) a loop region comprising the nucleotide sequence of SEQ ID NO: 4891; a nucleotide sequence at least 70%, 75%, 80%, 85%, 90%, 95% 96%, 97%, 98%, 99% identical to SEQ ID NO: 4891; a nucleotide sequence comprising one, two, three, or four, but no more than five different nucleotides relative to the nucleotide sequence of SEQ ID NO: 4891; or a nucleotide sequence comprising one, two, three, or four, but no more than five modifications relative to the nucleotide sequence of SEQ ID NO: 4891;
[0357] (iv) the antisense strand sequence of SEQ ID NO: 4920; and
[0358] (v) a 3′ flanking region comprising the nucleotide sequence of SEQ ID NO: 4900; a nucleotide sequence at least 70%, 75%, 80%, 85%, 90%, 95% 96%, 97%, 98%, 99% identical to SEQ ID NO: 4900; a nucleotide sequence comprising one, two, three, four, five, six, or seven, but no more than ten different nucleotides relative to the nucleotide sequence of SEQ ID NO: 4900; or a nucleotide sequence comprising one, two, three, four, five, six, or seven, but no more than ten modifications relative to SEQ ID NO: 4900.
   72. The modulatory polynucleotide of any one of embodiments 59, 61-63, 67, 68, or 71 or the AAV viral genome of any one of embodiments 60-63, 67, 68 or 71, where the nucleotide sequence encoding the modulatory polynucleotide comprises:
[0359] (i) a 5′ flanking region comprising the nucleotide sequence of SEQ ID NO: 4355; a nucleotide sequence at least 70%, 75%, 80%, 85%, 90%, 95% 96%, 97%, 98%, 99% identical to SEQ ID NO: 4355; a nucleotide sequence comprising one, two, three, four, five, six, or seven, but no more than ten different nucleotides relative to the nucleotide sequence of SEQ ID NO: 4355; or a nucleotide sequence comprising one, two, three, four, five, six, or seven, but no more than ten modifications relative to the nucleotide sequence of SEQ ID NO: 4355;
[0360] (ii) the sense strand sequence of SEQ ID NO: 4917;
[0361] (iii) a loop region comprising the nucleotide sequence of SEQ ID NO: 4366; a nucleotide sequence at least 70%, 75%, 80%, 85%, 90%, 95% 96%, 97%, 98%, 99% identical to SEQ ID NO: 4366; a nucleotide sequence comprising one, two, three, or four, but no more than five different nucleotides relative to the nucleotide sequence of SEQ ID NO: 4366; or a nucleotide sequence comprising one, two, three, or four, but no more than five modifications relative to the nucleotide sequence of SEQ ID NO: 4366;
[0362] (iv) the antisense strand sequence of SEQ ID NO: 4919; and
[0363] (v) a 3′ flanking region comprising the nucleotide sequence of SEQ ID NO: 4375; a nucleotide sequence at least 70%, 75%, 80%, 85%, 90%, 95% 96%, 97%, 98%, 99% identical to SEQ ID NO: 4375; a nucleotide sequence comprising one, two, three, four, five, six, or seven, but no more than ten different nucleotides relative to the nucleotide sequence of SEQ ID NO: 4375; or a nucleotide sequence comprising one, two, three, four, five, six, or seven, but no more than ten modifications relative to SEQ ID NO: 4375.
   73. The modulatory polynucleotide of any one of embodiments 59, 61-63, 67, or 68 or the AAV viral genome of any one of embodiments 60-63, 67, or 68, where the modulatory polynucleotide comprises:
[0364] (i) a 5′ flanking region comprising the nucleotide sequence of SEQ ID NO: 4880; a nucleotide sequence at least 70%, 75%, 80%, 85%, 90%, 95% 96%, 97%, 98%, 99% identical to SEQ ID NO: 4880; a nucleotide sequence comprising one, two, three, four, five, six, or seven, but no more than ten different nucleotides relative to the nucleotide sequence of SEQ ID NO: 4880; or a nucleotide sequence comprising one, two, three, four, five, six, or seven, but no more than ten modifications relative to the nucleotide sequence of SEQ ID NO: 4880;
[0365] (ii) the sense strand sequence of SEQ ID NO: 4922;
[0366] (iii) a loop region comprising the nucleotide sequence of SEQ ID NO: 4891; a nucleotide sequence at least 70%, 75%, 80%, 85%, 90%, 95% 96%, 97%, 98%, 99% identical to SEQ ID NO: 4891; a nucleotide sequence comprising one, two, three, or four, but no more than five different nucleotides relative to the nucleotide sequence of SEQ ID NO: 4891; or a nucleotide sequence comprising one, two, three, or four, but no more than five modifications relative to the nucleotide sequence of SEQ ID NO: 4891;
[0367] (iv) the antisense strand sequence of SEQ ID NO: 4924; and
[0368] (v) a 3′ flanking region comprising the nucleotide sequence of SEQ ID NO: 4900; a nucleotide sequence at least 70%, 75%, 80%, 85%, 90%, 95% 96%, 97%, 98%, 99% identical to SEQ ID NO: 4900; a nucleotide sequence comprising one, two, three, four, five, six, or seven, but no more than ten different nucleotides relative to the nucleotide sequence of SEQ ID NO: 4900; or a nucleotide sequence comprising one, two, three, four, five, six, or seven, but no more than ten modifications relative to SEQ ID NO: 4900.
   74. The modulatory polynucleotide of any one of embodiments 59, 61-63, 67, 68, or 73 or the AAV viral genome of any one of embodiments 60-63, 67, 68, or 73, where the nucleotide sequence encoding the modulatory polynucleotide comprises:
[0369] (i) a 5′ flanking region comprising the nucleotide sequence of SEQ ID NO: 4355; a nucleotide sequence at least 70%, 75%, 80%, 85%, 90%, 95% 96%, 97%, 98%, 99% identical to SEQ ID NO: 4355; a nucleotide sequence comprising one, two, three, four, five, six, or seven, but no more than ten different nucleotides relative to the nucleotide sequence of SEQ ID NO: 4355; or a nucleotide sequence comprising one, two, three, four, five, six, or seven, but no more than ten modifications relative to the nucleotide sequence of SEQ ID NO: 4355;
[0370] (ii) the sense strand sequence of SEQ ID NO: 4921;
[0371] (iii) a loop region comprising the nucleotide sequence of SEQ ID NO: 4366; a nucleotide sequence at least 70%, 75%, 80%, 85%, 90%, 95% 96%, 97%, 98%, 99% identical to SEQ ID NO: 4366; a nucleotide sequence comprising one, two, three, or four, but no more than five different nucleotides relative to the nucleotide sequence of SEQ ID NO: 4366; or a nucleotide sequence comprising one, two, three, or four, but no more than five modifications relative to the nucleotide sequence of SEQ ID NO: 4366;
[0372] (iv) the antisense strand sequence of SEQ ID NO: 4923; and
[0373] (v) a 3′ flanking region comprising the nucleotide sequence of SEQ ID NO: 4375; a nucleotide sequence at least 70%, 75%, 80%, 85%, 90%, 95% 96%, 97%, 98%, 99% identical to SEQ ID NO: 4375; a nucleotide sequence comprising one, two, three, four, five, six, or seven, but no more than ten different nucleotides relative to the nucleotide sequence of SEQ ID NO: 4375; or a nucleotide sequence comprising one, two, three, four, five, six, or seven, but no more than ten modifications relative to SEQ ID NO: 4375.
   75. The modulatory polynucleotide of any one of embodiments 59, 60-63, 65, or 68 or the AAV viral genome of any one of embodiments 60-63, 65, or 68, wherein the modulatory polynucleotide comprises:
[0374] (i) a 5′ flanking region comprising the nucleotide sequence of SEQ ID NO: 4879, a nucleotide sequence at least 70%, 75%, 80%, 85%, 90%, 95% 96%, 97%, 98%, 99% identical to SEQ ID NO: 4879, a nucleotide sequence comprising one, two, three, four, five, six, or seven, but no more than ten different nucleotides relative to the nucleotide sequence of SEQ ID NO: 4879; or a nucleotide sequence comprising one, two, three, four, five, six, or seven, but no more than ten modifications relative to the nucleotide sequence of SEQ ID NO: 4879;
[0375] (ii) the sense strand sequence of SEQ ID NO: 4966;
[0376] (iii) a loop region comprising the nucleotide sequence of SEQ ID NO: 4888, a nucleotide sequence at least 70%, 75%, 80%, 85%, 90%, 95% 96%, 97%, 98%, 99% identical to SEQ ID NO: 4888, a nucleotide sequence comprising one, two, three, or four, but no more than five different nucleotides relative to the nucleotide sequence of SEQ ID NO: 4888; or a nucleotide sequence comprising one, two, three, or four, but no more than five modifications relative to the nucleotide sequence of SEQ ID NO: 4888;
[0377] (iv) the antisense strand sequence comprises the nucleotide sequence of SEQ ID NO: 4908; and
[0378] (v) a 3′ flanking region of SEQ ID NO: 4898, a nucleotide sequence at least 70%, 75%, 80%, 85%, 90%, 95% 96%, 97%, 98%, 99% identical to SEQ ID NO: 4898, a nucleotide sequence comprising one, two, three, four, five, six, or seven, but no more than ten different nucleotides relative to the nucleotide sequence of SEQ ID NO: 4898, a nucleotide sequence comprising one, two, three, four, five, six, or seven, but no more than ten modifications relative to the nucleotide sequence of SEQ ID NO: 4898.
   76. The modulatory polynucleotide of any one of embodiments 59, 61-63, 65, 68, or 76 or the AAV viral genome of any one of embodiments 60-63, 65, 68, or 76, wherein the nucleotide sequence encoding the modulatory polynucleotide comprises:
[0379] (i) a 5′ flanking region comprising the nucleotide sequence of SEQ ID NO: 4354, a nucleotide sequence at least 70%, 75%, 80%, 85%, 90%, 95% 96%, 97%, 98%, 99% identical to SEQ ID NO: 4354, a nucleotide sequence comprising one, two, three, four, five, six, or seven, but no more than ten different nucleotides relative to the nucleotide sequence of SEQ ID NO: 4354; or a nucleotide sequence comprising one, two, three, four, five, six, or seven, but no more than ten modifications relative to the nucleotide sequence of SEQ ID NO: 4354;
[0380] (ii) the sense strand sequence of SEQ ID NO: 4965;
[0381] (iii) a loop region comprising the nucleotide sequence of SEQ ID NO: 4363, a nucleotide a nucleotide sequence comprising one, two, three, or four, but no more than five different nucleotides relative to the nucleotide sequence of SEQ ID NO: 4363; or a nucleotide sequence comprising one, two, three, or four, but no more than five modifications relative to the nucleotide sequence of SEQ ID NO: 4363;
[0382] (iv) the antisense strand sequence comprises the nucleotide sequence of SEQ ID NO: 4907; and
[0383] (v) a 3′ flanking region of SEQ ID NO: 4373, a nucleotide sequence at least 70%, 75%, 80%, 85%, 90%, 95% 96%, 97%, 98%, 99% identical to SEQ ID NO: 4373, a nucleotide sequence comprising one, two, three, four, five, six, or seven, but no more than ten different nucleotides relative to the nucleotide sequence of SEQ ID NO: 4373, a nucleotide sequence comprising one, two, three, four, five, six, or seven, but no more than ten modifications relative to the nucleotide sequence of SEQ ID NO: 4373.
   77. The modulatory polynucleotide of any one of embodiments 59, 61-63, 65, or 68 or the AAV viral genome of any one of embodiments 60-63, 65, or 68, wherein the modulatory polynucleotide comprises:
[0384] (i) a 5′ flanking region comprising the nucleotide sequence of SEQ ID NO: 4879, a nucleotide sequence at least 70%, 75%, 80%, 85%, 90%, 95% 96%, 97%, 98%, 99% identical to SEQ ID NO: 4879, a nucleotide sequence comprising one, two, three, four, five, six, or seven, but no more than ten different nucleotides relative to the nucleotide sequence of SEQ ID NO: 4879; or a nucleotide sequence comprising one, two, three, four, five, six, or seven, but no more than ten modifications relative to the nucleotide sequence of SEQ ID NO: 4879;
[0385] (ii) the sense strand sequence of SEQ ID NO: 4970;
[0386] (iii) a loop region comprising the nucleotide sequence of SEQ ID NO: 4888, a nucleotide sequence at least 70%, 75%, 80%, 85%, 90%, 95% 96%, 97%, 98%, 99% identical to SEQ ID NO: 4888, a nucleotide sequence comprising one, two, three, or four, but no more than five different nucleotides relative to the nucleotide sequence of SEQ ID NO: 4888; or a nucleotide sequence comprising one, two, three, or four, but no more than five modifications relative to the nucleotide sequence of SEQ ID NO: 4888;
[0387] (iv) the antisense strand sequence comprises the nucleotide sequence of SEQ ID NO: 4912; and (v) a 3′ flanking region of SEQ ID NO: 4898, a nucleotide sequence at least 70%, 75%, 80%, 85%, 90%, 95% 96%, 97%, 98%, 99% identical to SEQ ID NO: 4898, a nucleotide sequence comprising one, two, three, four, five, six, or seven, but no more than ten different nucleotides relative to the nucleotide sequence of SEQ ID NO: 4898, a nucleotide sequence comprising one, two, three, four, five, six, or seven, but no more than ten modifications relative to the nucleotide sequence of SEQ ID NO: 4898.
   78. The modulatory polynucleotide of any one of embodiments 59, 61-63, 65, 68, or 77 or the AAV viral genome of any one of embodiments 60-63, 65, 68, or 77, wherein the nucleotide sequence encoding the modulatory polynucleotide comprises:
[0388] (i) a 5′ flanking region comprising the nucleotide sequence of SEQ ID NO: 4354, a nucleotide sequence at least 70%, 75%, 80%, 85%, 90%, 95% 96%, 97%, 98%, 99% identical to SEQ ID NO: 4354, a nucleotide sequence comprising one, two, three, four, five, six, or seven, but no more than ten different nucleotides relative to the nucleotide sequence of SEQ ID NO: 4354; or a nucleotide sequence comprising one, two, three, four, five, six, or seven, but no more than ten modifications relative to the nucleotide sequence of SEQ ID NO: 4354;
[0389] (ii) the sense strand sequence of SEQ ID NO: 4969;
[0390] (iii) a loop region comprising the nucleotide sequence of SEQ ID NO: 4363, a nucleotide sequence at least 70%, 75%, 80%, 85%, 90%, 95% 96%, 97%, 98%, 99% identical to SEQ ID NO: 4363, a nucleotide sequence comprising one, two, three, or four, but no more than five different nucleotides relative to the nucleotide sequence of SEQ ID NO: 4363; or a nucleotide sequence comprising one, two, three, or four, but no more than five modifications relative to the nucleotide sequence of SEQ ID NO: 4363;
[0391] (iv) the antisense strand sequence comprises the nucleotide sequence of SEQ ID NO: 4911; and
[0392] (v) a 3′ flanking region of SEQ ID NO: 4373, a nucleotide sequence at least 70%, 75%, 80%, 85%, 90%, 95% 96%, 97%, 98%, 99% identical to SEQ ID NO: 4373, a nucleotide sequence comprising one, two, three, four, five, six, or seven, but no more than ten different nucleotides relative to the nucleotide sequence of SEQ ID NO: 4373, a nucleotide sequence comprising one, two, three, four, five, six, or seven, but no more than ten modifications relative to the nucleotide sequence of SEQ ID NO: 4373.
   79. The modulatory polynucleotide of any one of embodiments 59, 61-63, 65, or 68 or the AAV viral genome of any one of embodiments 60-63, 65, or 68, wherein the modulatory polynucleotide comprises:
[0393] (i) a 5′ flanking region comprising the nucleotide sequence of SEQ ID NO: 4879, a nucleotide sequence at least 70%, 75%, 80%, 85%, 90%, 95% 96%, 97%, 98%, 99% identical to SEQ ID NO: 4879, a nucleotide sequence comprising one, two, three, four, five, six, or seven, but no more than ten different nucleotides relative to the nucleotide sequence of SEQ ID NO: 4879; or a nucleotide sequence comprising one, two, three, four, five, six, or seven, but no more than ten modifications relative to the nucleotide sequence of SEQ ID NO: 4879;
[0394] (ii) the sense strand sequence of SEQ ID NO: 4978;
[0395] (iii) a loop region comprising the nucleotide sequence of SEQ ID NO: 4888, a nucleotide sequence at least 70%, 75%, 80%, 85%, 90%, 95% 96%, 97%, 98%, 99% identical to SEQ ID NO: 4888, a nucleotide sequence comprising one, two, three, or four, but no more than five different nucleotides relative to the nucleotide sequence of SEQ ID NO: 4888; or a nucleotide sequence comprising one, two, three, or four, but no more than five modifications relative to the nucleotide sequence of SEQ ID NO: 4888;
[0396] (iv) the antisense strand sequence comprises the nucleotide sequence of SEQ ID NO: 4920; and
[0397] (v) a 3′ flanking region of SEQ ID NO: 4898, a nucleotide sequence at least 70%, 75%, 80%, 85%, 90%, 95% 96%, 97%, 98%, 99% identical to SEQ ID NO: 4898, a nucleotide sequence comprising one, two, three, four, five, six, or seven, but no more than ten different nucleotides relative to the nucleotide sequence of SEQ ID NO: 4898, a nucleotide sequence comprising one, two, three, four, five, six, or seven, but no more than ten modifications relative to the nucleotide sequence of SEQ ID NO: 4898.
   80. The modulatory polynucleotide of any one of embodiments 59, 61-63, 65, 68, or 79 or the AAV viral genome of any one of embodiments 60-63, 65, 68, or 79, wherein the nucleotide sequence encoding the modulatory polynucleotide comprises:
[0398] (i) a 5′ flanking region comprising the nucleotide sequence of SEQ ID NO: 4354, a nucleotide sequence at least 70%, 75%, 80%, 85%, 90%, 95% 96%, 97%, 98%, 99% identical to SEQ ID NO: 4354, a nucleotide sequence comprising one, two, three, four, five, six, or seven, but no more than ten different nucleotides relative to the nucleotide sequence of SEQ ID NO: 4354; or a nucleotide sequence comprising one, two, three, four, five, six, or seven, but no more than ten modifications relative to the nucleotide sequence of SEQ ID NO: 4354;
[0399] (ii) the sense strand sequence of SEQ ID NO: 4977;
[0400] (iii) a loop region comprising the nucleotide sequence of SEQ ID NO: 4363, a nucleotide sequence at least 70%, 75%, 80%, 85%, 90%, 95% 96%, 97%, 98%, 99% identical to SEQ ID NO: 4363, a nucleotide sequence comprising one, two, three, or four, but no more than five different nucleotides relative to the nucleotide sequence of SEQ ID NO: 4363; or a nucleotide sequence comprising one, two, three, or four, but no more than five modifications relative to the nucleotide sequence of SEQ ID NO: 4363;
[0401] (iv) the antisense strand sequence comprises the nucleotide sequence of SEQ ID NO: 4919; and
[0402] (v) a 3′ flanking region of SEQ ID NO: 4373, a nucleotide sequence at least 70%, 75%, 80%, 85%, 90%, 95% 96%, 97%, 98%, 99% identical to SEQ ID NO: 4373, a nucleotide sequence comprising one, two, three, four, five, six, or seven, but no more than ten different nucleotides relative to the nucleotide sequence of SEQ ID NO: 4373, a nucleotide sequence comprising one, two, three, four, five, six, or seven, but no more than ten modifications relative to the nucleotide sequence of SEQ ID NO: 4373.
   81. The modulatory polynucleotide of any one of embodiments 59, 61-63, 65, or 68 or the AAV viral genome of any one of embodiments 60-63, 65, or 68, wherein the modulatory polynucleotide comprises:
[0403] (i) a 5′ flanking region comprising the nucleotide sequence of SEQ ID NO: 4879, a nucleotide sequence at least 70%, 75%, 80%, 85%, 90%, 95% 96%, 97%, 98%, 99% identical to SEQ ID NO: 4879, a nucleotide sequence comprising one, two, three, four, five, six, or seven, but no more than ten different nucleotides relative to the nucleotide sequence of SEQ ID NO: 4879; or a nucleotide sequence comprising one, two, three, four, five, six, or seven, but no more than ten modifications relative to the nucleotide sequence of SEQ ID NO: 4879;
[0404] (ii) the sense strand sequence of SEQ ID NO: 4982;
[0405] (iii) a loop region comprising the nucleotide sequence of SEQ ID NO: 4888, a nucleotide sequence at least 70%, 75%, 80%, 85%, 90%, 95% 96%, 97%, 98%, 99% identical to SEQ ID NO: 4888, a nucleotide sequence comprising one, two, three, or four, but no more than five different nucleotides relative to the nucleotide sequence of SEQ ID NO: 4888; or a nucleotide sequence comprising one, two, three, or four, but no more than five modifications relative to the nucleotide sequence of SEQ ID NO: 4888;
[0406] (iv) the antisense strand sequence comprises the nucleotide sequence of SEQ ID NO: 4924; and
[0407] (v) a 3′ flanking region of SEQ ID NO: 4898, a nucleotide sequence at least 70%, 75%, 80%, 85%, 90%, 95% 96%, 97%, 98%, 99% identical to SEQ ID NO: 4898, a nucleotide sequence comprising one, two, three, four, five, six, or seven, but no more than ten different nucleotides relative to the nucleotide sequence of SEQ ID NO: 4898, a nucleotide sequence comprising one, two, three, four, five, six, or seven, but no more than ten modifications relative to the nucleotide sequence of SEQ ID NO: 4898.
   82. The modulatory polynucleotide of any one of embodiments 59, 61-63, 65, 68, or 81 or the AAV viral genome of any one of embodiments 60-63, 65, 68, or 81, wherein the nucleotide sequence encoding the modulatory polynucleotide comprises:
[0408] (i) a 5′ flanking region comprising the nucleotide sequence of SEQ ID NO: 4354, a nucleotide sequence at least 70%, 75%, 80%, 85%, 90%, 95% 96%, 97%, 98%, 99% identical to SEQ ID NO: 4354, a nucleotide sequence comprising one, two, three, four, five, six, or seven, but no more than ten different nucleotides relative to the nucleotide sequence of SEQ ID NO: 4354; or a nucleotide sequence comprising one, two, three, four, five, six, or seven, but no more than ten modifications relative to the nucleotide sequence of SEQ ID NO: 4354;
[0409] (ii) the sense strand sequence of SEQ ID NO: 4981;
[0410] (iii) a loop region comprising the nucleotide sequence of SEQ ID NO: 4363, a nucleotide a nucleotide sequence comprising one, two, three, or four, but no more than five different nucleotides relative to the nucleotide sequence of SEQ ID NO: 4363; or a nucleotide sequence comprising one, two, three, or four, but no more than five modifications relative to the nucleotide sequence of SEQ ID NO: 4363;
[0411] (iv) the antisense strand sequence comprises the nucleotide sequence of SEQ ID NO: 4923; and
[0412] (v) a 3′ flanking region of SEQ ID NO: 4373, a nucleotide sequence at least 70%, 75%, 80%, 85%, 90%, 95% 96%, 97%, 98%, 99% identical to SEQ ID NO: 4373, a nucleotide sequence comprising one, two, three, four, five, six, or seven, but no more than ten different nucleotides relative to the nucleotide sequence of SEQ ID NO: 4373, a nucleotide sequence comprising one, two, three, four, five, six, or seven, but no more than ten modifications relative to the nucleotide sequence of SEQ ID NO: 4373.
   83. The modulatory polynucleotide of any one of embodiments 59 or 61-82 or the AAV viral genome of any one of embodiments 62-82, wherein the nucleotide sequence encoding the modulatory polynucleotide comprises the nucleotide sequence of the nucleotide sequence of any one of SEQ ID NOs: 4380-4409 or 5027-5050, or a nucleotide sequence at least 70%, 75%, 80%, 85%, 90%, 92%, 95%, 96%, 97%, 98%, or 99% identical thereto.
   84. The modulatory polynucleotide of any one of embodiments 59, 61-63, 67-70, or 83, or the AAV viral genome of any one of embodiments 60-63, 67-70, or 83, wherein the nucleotide sequence encoding the modulatory polynucleotide comprises the nucleotide sequence of the nucleotide sequence of SEQ ID NO: 4405, or a nucleotide sequence at least 70%, 75%, 80%, 85%, 90%, 92%, 95%, 96%, 97%, 98%, or 99% identical thereto.
   85. The modulatory polynucleotide of any one of embodiments 59, 61-63, 67, 68, 71, 72, or 83, or the AAV viral genome of any one of embodiments 60-63, 67, 68, 71, 72, or 83, wherein the nucleotide sequence encoding the modulatory polynucleotide comprises the nucleotide sequence of SEQ ID NO: 4408, or a nucleotide sequence at least 70%, 75%, 80%, 85%, 90%, 92%, 95%, 96%, 97%, 98%, or 99% identical thereto.
   86. The modulatory polynucleotide of any one of embodiments 59, 61-63, 67, 68, 73, 74, or 83, or the AAV viral genome of any one of embodiments 60-63, 67, 68, 73, 74, or 83, wherein the nucleotide sequence encoding the modulatory polynucleotide comprises the nucleotide sequence of SEQ ID NO: 4409, or a nucleotide sequence at least 70%, 75%, 80%, 85%, 90%, 92%, 95%, 96%, 97%, 98%, or 99% identical thereto.
   87. The modulatory polynucleotide of any one of embodiments 59, 61-63, 65, 68, 75, 76, or 83, or the AAV viral genome of any one of embodiments 60-63, 65, 68, 75, 76, or 83, wherein the nucleotide sequence encoding the modulatory polynucleotide comprises the nucleotide sequence of SEQ ID NO: 4390, or a nucleotide sequence at least 70%, 75%, 80%, 85%, 90%, 92%, 95%, 96%, 97%, 98%, or 99% identical thereto.
   88. The modulatory polynucleotide of any one of embodiments 59, 61-63, 65, 68, 77, 78, or 83, or the AAV viral genome of any one of embodiments 60-63, 65, 68, 77, 78, or 83, wherein the nucleotide sequence encoding the modulatory polynucleotide comprises the nucleotide sequence of SEQ ID NO: 4391, or a nucleotide sequence at least 70%, 75%, 80%, 85%, 90%, 92%, 95%, 96%, 97%, 98%, or 99% identical thereto.
   89. The modulatory polynucleotide of any one of embodiments 59, 61-63, 65, 68, 79, 80, or 83, or the AAV viral genome of any one of embodiments 60-63, 65, 68, 79, 80, or 83, wherein the nucleotide sequence encoding the modulatory polynucleotide comprises the nucleotide sequence of SEQ ID NO: 4393, or a nucleotide sequence at least 70%, 75%, 80%, 85%, 90%, 92%, 95%, 96%, 97%, 98%, or 99% identical thereto.
   90. The modulatory polynucleotide of any one of embodiments 59, 61-63, 65, 68, 81, 82, or 83, or the AAV viral genome of any one of embodiments 60-63, 65, 68, 81, 82, or 83, wherein the nucleotide sequence encoding the modulatory polynucleotide comprises the nucleotide sequence of SEQ ID NO: 4394, or a nucleotide sequence at least 70%, 75%, 80%, 85%, 90%, 92%, 95%, 96%, 97%, 98%, or 99% identical thereto.
   91. An adeno-associated virus (AAV) viral genome comprising a promoter operably linked to a nucleic acid encoding the modulatory polynucleotide of any one of embodiments 59-90 or the siRNA of any one of embodiments 1-11 or 13-58.
   92. The AAV viral genome of any one of embodiments 12-58 or 60-90, wherein the AAV viral genome further comprises a promoter operably linked to the nucleotide sequence encoding the sense strand sequence and the antisense strand sequence or the modulatory polynucleotide.
   93. The AAV viral genome of embodiment 92, wherein the promoter is a ubiquitous promoter.
   94. The AAV viral genome of embodiment 92, wherein the promoter is a cell or tissue specific promoter.
   95. The AAV viral genome of any one of embodiments 92-94, wherein the promoter is chosen from human elongation factor 1α-subunit (EF1α), cytomegalovirus (CMV) immediate-early enhancer and/or promoter, chicken β-actin (CBA) and its derivative CAG, B glucuronidase (GUSB), or ubiquitin C (UBC), neuron-specific enolase (NSE), platelet-derived growth factor (PDGF), platelet-derived growth factor B-chain (PDGF-β), intercellular adhesion molecule 2 (ICAM-2), synapsin (Syn), methyl-CpG binding protein 2 (MeCP2), Ca2+/calmodulin-dependent protein kinase II (CaMKII), metabotropic glutamate receptor 2 (mGluR2), neurofilament light chain (NFL) or neurofilament heavy chain (NFH), β-globin minigene nβ2, preproenkephalin (PPE), enkephalin (Enk) and excitatory amino acid transporter 2 (EAAT2), glial fibrillary acidic protein (GFAP), myelin basic protein (MBP), a cardiovascular promoter (e.g., αMHC, cTnT, and CMV-MLC2k), a liver promoter (e.g., hAAT, TBG), a skeletal muscle promoter (e.g., desmin, MCK, C512) or a functional fragment, e.g., a truncation, or a functional variant thereof.
   96. The AAV viral genome of any one of embodiments 92-95, wherein the promoter comprises a CBA promoter or a variant thereof.
   97. The AAV viral genome of any one of embodiments 92-95, wherein the promoter comprises the nucleotide sequence of any one of the nucleotide sequences provided in Table 2; a nucleotide sequence comprising at least one, two, three, four, five, six, or seven but no more than ten modifications, e.g., substitutions, insertions, or deletions, relative to any one of the nucleotide sequences provided in Table 2; or a nucleotide sequence with at least 80%, 85%, 90%, 92%, 95%, 96%, 97%, 98%, or 99% sequence identity to any one of the nucleotide sequences provided in Table 2.
   98. The AAV viral genome of any one of embodiments 92-97, wherein the promoter comprises the nucleotide sequence of SEQ ID NO: 5199; a nucleotide sequence comprising at least one, two, three, four, five, six, or seven but no more than ten modifications, e.g., substitutions, insertions, or deletions, relative to SEQ ID NO: 5199; or a nucleotide sequence with at least 80%, 85%, 90%, 92%, 95%, 96%, 97%, 98%, or 99% sequence identity to SEQ ID NO: 5199.
   99. The AAV viral genome of any one of embodiments 92-97, wherein the AAV viral genome further comprises a polyA signal sequence.
   100. The AAV viral genome of embodiment 99, wherein the polyA signal sequence comprises the nucleotide sequence of SEQ ID NO: 4476; a nucleotide sequence comprising at least one, two, three, four, five, six, or seven but no more than ten modifications, e.g., substitutions, insertions, or deletions, relative to SEQ ID NO: 4476; or a nucleotide sequence at least 80%, 85%, 90%, 92%, 95%, 96%, 97%, 98%, or 99% identical to SEQ ID NO: 4476.
   101. The AAV viral genome of any one of embodiments 26-32, wherein the AAV viral genome further comprises an inverted terminal repeat (ITR) sequence.
   102. The AAV viral genome of embodiment 101, wherein the ITR comprises the nucleotide sequence of SEQ ID NO: 5197, 5200, 4469, or 4470; a nucleotide sequence comprising at least one, two, three, four, five, six, or seven but no more than ten modifications, e.g., substitutions, insertions, or deletions, relative to SEQ ID NO: 5197, 5200, 4469, or 4470; or a nucleotide sequence with at least 80%, 85%, 90%, 92%, 95%, 96%, 97%, 98%, or 99% sequence identity to SEQ ID NO: 5197, 5200, 4469, or 4470.
   103. The AAV viral genome of any one of embodiments 12-58 or 60-102, wherein the AAV viral genome comprises an ITR sequence positioned 5′ relative to the nucleic acid encoding the modulatory polynucleotide or siRNA.
   104. The AAV viral genome of embodiment 103, wherein the ITR positioned 5′ relative to the nucleic acid encoding the modulator polynucleotide or siRNA comprises the nucleotide sequence of SEQ ID NO: 5197 or 4469; a nucleotide sequence comprising at least one, two, three, four, five, six, or seven but no more than ten modifications, e.g., substitutions, insertions, or deletions, relative to SEQ ID NO: 5197 or 4469; or a nucleotide sequence with at least 80%, 85%, 90%, 92%, 95%, 96%, 97%, 98%, or 99% sequence identity to SEQ ID NO: 5197 or 4469.
   105. The AAV viral genome of any one of embodiments 12-58 or 60-104, wherein the AAV viral genome comprises an ITR sequence positioned 3′ relative to the nucleic acid encoding the modulatory polynucleotide or siRNA.
   106. The AAV viral genome of embodiment 103, wherein the ITR positioned 3′ relative to the nucleic acid encoding the modulator polynucleotide or siRNA comprises the nucleotide sequence of SEQ ID NO: 5200 or 4470; a nucleotide sequence comprising at least one, two, three, four, five, six, or seven but no more than ten modifications, e.g., substitutions, insertions, or deletions, relative to SEQ ID NO: 5200 or 4470; or a nucleotide sequence with at least 80%, 85%, 90%, 92%, 95%, 96%, 97%, 98%, or 99% sequence identity to SEQ ID NO: 5200 or 4470.
   107. The AAV viral genome particle of any one of embodiments 12-58 or 60-106, wherein the AAV viral genome comprises an ITR sequence positioned 5′ relative to the nucleic acid encoding the modulatory polynucleotide or siRNA and an ITR sequence positioned 3′ relative to the nucleic acid encoding the modulatory polynucleotide or siRNA.
   108. The AAV viral genome of any one of embodiments 105-107, wherein:
[0413] (i) the ITR positioned 5′ relative to the nucleic acid encoding the modulatory polynucleotide or siRNA comprises the nucleotide sequence of SEQ ID NO: 5197; a nucleotide sequence at least 80%, 85%, 90%, 92% 95%, 96%, 97%, 98%, or 99% identical to SEQ ID NO: 5197; or a nucleotide sequence comprising at least one, two, three, four, five, six, or seven but no more than ten modifications, e.g., substitutions, insertions, or deletions, relative to SEQ ID NO: 5197; and
[0414] (ii) the ITR positioned 3′ relative to the nucleic acid encoding the modulatory polynucleotide or siRNA comprises the nucleotide sequence of SEQ ID NO: 5200; a nucleotide sequence at least 80%, 85%, 90%, 92% 95%, 96%, 97%, 98%, or 99% identical to SEQ ID NO: 5200; or a nucleotide sequence comprising at least one, two, three, four, five, six, or seven but no more than ten modifications, e.g., substitutions, insertions, or deletions, relative to SEQ ID NO: 5200.
   109. The AAV viral genome of any one of embodiments 105-107, wherein:
[0415] (i) the ITR positioned 5′ relative to the nucleic acid encoding the modulatory polynucleotide or siRNA comprises the nucleotide sequence of SEQ ID NO: 4469; a nucleotide sequence at least 80%, 85%, 90%, 92%, 95%, 96%, 97%, 98%, or 99% identical to SEQ ID NO: 4469; or a nucleotide sequence comprising at least one, two, three, four, five, six, or seven but no more than ten modifications, e.g., substitutions, insertions, or deletions, relative to SEQ ID NO: 4469; and
[0416] (ii) the ITR positioned 3′ relative to the nucleic acid encoding the modulatory polynucleotide or siRNA comprises the nucleotide sequence of SEQ ID NO: 4470; a nucleotide sequence at least 80%, 85%, 90%, 92%, 95%, 96%, 97%, 98%, or 99% identical to SEQ ID NO: 4470; or a nucleotide sequence comprising at least one, two, three, four, five, six, or seven but no more than ten modifications, e.g., substitutions, insertions, or deletions, relative to SEQ ID NO: 4470.
   110. The AAV viral genome of any one of embodiments 12-58 or 60-109, wherein the AAV viral genome further comprises an enhancer, a Kozak sequence, an intron region, and/or an exon region.
   111. The AAV viral genome of embodiment 110, wherein the enhancer comprises:
[0417] (i) a CMVie enhancer or variant thereof; or
[0418] (ii) the nucleotide sequence of SEQ ID NO: 4471 or 4472; a nucleotide sequence comprising at least one, two, three, four, five, six, or seven but no more than ten modifications, e.g., substitutions, insertions, or deletions, relative to SEQ ID NO: 4471 or 4472; or a nucleotide sequence with at least 80%, 85%, 90%, 92%, 95%, 96%, 97%, 98%, or 99% sequence identity to SEQ ID NO: 4471 or 4472.
   112. The AAV viral genome of embodiment 110 or 111, wherein the enhancer comprises the nucleotide sequence of SEQ ID NO: 4471; a nucleotide sequence comprising at least one, two, three, four, five, six, or seven but no more than ten modifications, e.g., substitutions, insertions, or deletions, relative to SEQ ID NO: 4471; or a nucleotide sequence with at least 80%, 85%, 90%, 92%, 95%, 96%, 97%, 98%, or 99% sequence identity to SEQ ID NO: 4471.
   113. The AAV viral genome of any one of embodiments 12-58 or 60-112, which comprises a CMVie enhancer or variant thereof; and a CBA promoter or variant thereof; optionally wherein the CMVie enhancer or variant thereof is present 5′ relative to the CBA promoter or variant thereof.
   114. The AAV viral genome of any one of embodiments 110-113, wherein the enhancer and promoter comprise the nucleotide sequence of SEQ ID NO: 4473 or 4474; a nucleotide sequence comprising at least one, two, three, four, five, six, or seven but no more than ten modifications, e.g., substitutions, insertions, or deletions, relative to SEQ ID NO: 4473 or 4474; or a nucleotide sequence with at least 80%, 85%, 90%, 92%, 95%, 96%, 97%, 98%, or 99% sequence identity to SEQ ID NO: 4473 or 4474.
   115. The AAV viral genome of any one of embodiments 110-114, wherein the intron comprises:
[0419] (i) a human beta globin intron (hBG intron) or variant thereof; or
[0420] (ii) the nucleotide sequence of SEQ ID NO: 4475; a nucleotide sequence comprising at least one, two, three, four, five, six, or seven but no more than ten modifications, e.g., substitutions, insertions, or deletions, relative to SEQ ID NO: 4475; or a nucleotide sequence with at least 80%, 85%, 90%, 92%, 95%, 96%, 97%, 98%, or 99% sequence identity to SEQ ID NO: 4475.
   116. The AAV viral genome of any one of embodiments 12-58 or 60-115, wherein the AAV viral genome further comprises a nucleotide sequence encoding a miR binding site, e.g., a miR binding site that modulates, e.g., reduces expression of the payload encoded by the viral genome in a cell or tissue where the corresponding miRNA is expressed.
   117. The AAV viral genome of embodiment 116, wherein the encoded miR binding site modulates, e.g., reduces expression of the encoded payload in a cell or tissue of the DRG, liver, heart, hematopoietic lineage, or a combination thereof.
   118. The AAV viral genome of any one of embodiments 12-58 or 60-117, wherein the AAV viral genome comprises at least 1-5 copies of the encoded miR binding site, e.g., at least 1, 2, 3, 4, or 5 copies, optionally wherein the at least 1-5 copies are continuous (e.g., not separated by a spacer) or the at least 1-5 copies are separated by a spacer.
   119. The AAV viral genome of any one of embodiments 12-58 or 60-118, wherein the AAV viral genome is self-complementary.
   120. The AAV viral genome of any one of embodiments 12-58 or 60-118, wherein the AAV viral genome is single stranded.
   121. The AAV viral genome of any one of embodiments 12-58 or 60-120, wherein the AAV viral genome further comprises a nucleotide sequence encoding a Rep protein, e.g., a non-structural protein, wherein the Rep protein comprises a Rep78 protein, a Rep68, Rep52 protein, and/or a Rep40 protein (e.g., a Rep78 and a Rep52 protein).
   122. The AAV viral genome of any one of embodiments 12-58 or 60-121, wherein the AAV viral genome comprises in 5′ to 3′ order:
[0421] (i) an ITR;
[0422] (ii) an enhancer (e.g., a CMVie enhancer or variant thereof);
[0423] (iii) a promoter (e.g., a CBA promoter or variant thereof);
[0424] (iv) an intron (e.g., an hBG intron or variant thereof);
[0425] (v) a nucleic acid sequence encoding a modulatory polynucleotide (e.g. the modulatory polynucleotide of any one of embodiments 59-90);
[0426] (vi) a polyA signal sequence; and
[0427] (vii) an ITR.
   123. The AAV viral genome of any one of embodiments 12-58 or 60-122, wherein the AAV viral genome comprises in 5′ to 3′ order:
[0428] (i) an ITR, wherein the ITR comprises the nucleotide sequence of SEQ ID NO: 5197; a nucleotide sequence at least 80%, 85%, 90%, 92%, 95%, 96%, 97%, 98%, or 99% identical to SEQ ID NO: 5197; or a nucleotide sequence comprising at least one, two, three, four, five, six, or seven but no more than ten modifications, e.g., substitutions, insertions, or deletions, relative to SEQ ID NO: 5197;
[0429] (ii) an enhancer, wherein the enhancer comprises the nucleotide sequence of SEQ ID NO: 4471; a nucleotide sequence comprising at least one, two, three, four, five, six, or seven but no more than ten modifications, e.g., substitutions, insertions, or deletions, relative to SEQ ID NO: 4471; or a nucleotide sequence at least 80%, 85%, 90%, 92%, 95%, 96%, 97%, 98%, or 99% identical to SEQ ID NO: 4471;
[0430] (iii) a promoter, wherein the promoter comprises the nucleotide sequence of SEQ ID NO: 5199; a nucleotide sequence comprising at least one, two, three, four, five, six, or seven but no more than ten modifications, e.g., substitutions, insertions, or deletions, relative to SEQ ID NO: 5199; or a nucleotide sequence at least 80%, 85%, 90%, 92%, 95%, 96%, 97%, 98%, or 99% identical to SEQ ID NO: 5199;
[0431] (iv) an intron, wherein the intro comprises the nucleotide sequence of SEQ ID NO: 4475; a nucleotide sequence comprising at least one, two, three, four, five, six, or seven but no more than ten modifications, e.g., substitutions, insertions, or deletions, relative to SEQ ID NO: 4475; or a nucleotide sequence at least 80%, 80%, 85%, 90%, 92%, 95%, 96%, 97%, 98%, or 99% identical to SEQ ID NO: 4475;
[0432] (v) a nucleotide sequence encoding a modulatory polynucleotide, wherein the nucleotide sequence comprises any one of SEQ ID NOs: 4380-4409 or 5027-5050, or nucleotide sequence at least 80%, 85%, 90%, 92%, 95%, 96%, 97%, 98%, or 99% identical thereto;
[0433] (vi) a polyA signal sequence, wherein the polyA signal sequence comprises the nucleotide sequence of SEQ ID NO: 4476; a nucleotide sequence comprising at least one, two, three, four, five, six, or seven but no more than ten modifications, e.g., substitutions, insertions, or deletions, relative to SEQ ID NO: 4476; or a nucleotide sequence at least 80%, 85%, 90%, 92%, 95%, 96%, 97%, 98%, or 99% identical to SEQ ID NO: 4476; and
[0434] (vii) an ITR, wherein the ITR comprises the nucleotide sequence of SEQ ID NO: 5200; a nucleotide sequence at least 80%, 85%, 90%, 92%, 95%, 96%, 97%, 98%, or 99% identical to SEQ ID NO: 5200; or a nucleotide sequence comprising at least one, two, three, four, five, six, or seven but no more than ten modifications, e.g., substitutions, insertions, or deletions, relative to SEQ ID NO: 5200.
   124. The AAV viral genome of any one of embodiments 12-58 or 60-122, wherein the AAV viral genome comprises in 5′ to 3′ order:
[0435] (i) an ITR, wherein the ITR comprises the nucleotide sequence of SEQ ID NO: 5197; a nucleotide sequence at least 80%, 85%, 90%, 92%, 95%, 96%, 97%, 98%, or 99% identical to SEQ ID NO: 5197; or a nucleotide sequence comprising at least one, two, three, four, five, six, or seven but no more than ten modifications, e.g., substitutions, insertions, or deletions, relative to SEQ ID NO: 5197;
[0436] (ii) an enhancer, wherein the enhancer comprises the nucleotide sequence of SEQ ID NO: 4471; a nucleotide sequence comprising at least one, two, three, four, five, six, or seven but no more than ten modifications, e.g., substitutions, insertions, or deletions, relative to SEQ ID NO: 4471; or a nucleotide sequence at least 80%, 85%, 90%, 92%, 95%, 96%, 97%, 98%, or 99% identical to SEQ ID NO: 4471;
[0437] (iii) a promoter, wherein the promoter comprises the nucleotide sequence of SEQ ID NO: 5199; a nucleotide sequence comprising at least one, two, three, four, five, six, or seven but no more than ten modifications, e.g., substitutions, insertions, or deletions, relative to SEQ ID NO: 5199; or a nucleotide sequence at least 80%, 85%, 90%, 92%, 95%, 96%, 97%, 98%, or 99% identical to SEQ ID NO: 5199;
[0438] (iv) an intron, wherein the intro comprises the nucleotide sequence of SEQ ID NO: 4475; a nucleotide sequence comprising at least one, two, three, four, five, six, or seven but no more than ten modifications, e.g., substitutions, insertions, or deletions, relative to SEQ ID NO: 4475; or a nucleotide sequence at least 80%, 80%, 85%, 90%, 92%, 95%, 96%, 97%, 98%, or 99% identical to SEQ ID NO: 4475;
[0439] (v) a nucleotide sequence encoding a modulatory polynucleotide, wherein the nucleotide sequence comprises any one of SEQ ID NOs: 4405, 4408, 4409, 4390, 4391, 4393, or 4394, or nucleotide sequence at least 80%, 85%, 90%, 92%, 95%, 96%, 97%, 98%, or 99% identical thereto;
[0440] (vi) a polyA signal sequence, wherein the polyA signal sequence comprises the nucleotide sequence of SEQ ID NO: 4476; a nucleotide sequence comprising at least one, two, three, four, five, six, or seven but no more than ten modifications, e.g., substitutions, insertions, or deletions, relative to SEQ ID NO: 4476; or a nucleotide sequence at least 80%, 85%, 90%, 92%, 95%, 96%, 97%, 98%, or 99% identical to SEQ ID NO: 4476; and
[0441] (vii) an ITR, wherein the ITR comprises the nucleotide sequence of SEQ ID NO: 5200; a nucleotide sequence at least 80%, 85%, 90%, 92%, 95%, 96%, 97%, 98%, or 99% identical to SEQ ID NO: 5200; or a nucleotide sequence comprising at least one, two, three, four, five, six, or seven but no more than ten modifications, e.g., substitutions, insertions, or deletions, relative to SEQ ID NO: 5200.
   125. The AAV viral genome of any one of embodiments 12-58 or 60-122, wherein the AAV viral genome comprises in 5′ to 3′ order:
[0442] (i) an ITR, wherein the ITR comprises the nucleotide sequence of SEQ ID NO: 5197; a nucleotide sequence at least 80%, 85%, 90%, 92%, 95%, 96%, 97%, 98%, or 99% identical to SEQ ID NO: 5197; or a nucleotide sequence comprising at least one, two, three, four, five, six, or seven but no more than ten modifications, e.g., substitutions, insertions, or deletions, relative to SEQ ID NO: 5197;
[0443] (ii) an enhancer, wherein the enhancer comprises the nucleotide sequence of SEQ ID NO: 4471; a nucleotide sequence comprising at least one, two, three, four, five, six, or seven but no more than ten modifications, e.g., substitutions, insertions, or deletions, relative to SEQ ID NO: 4471; or a nucleotide sequence at least 80%, 85%, 90%, 92%, 95%, 96%, 97%, 98%, or 99% identical to SEQ ID NO: 4471;
[0444] (iii) a promoter, wherein the promoter comprises the nucleotide sequence of SEQ ID NO: 5199; a nucleotide sequence comprising at least one, two, three, four, five, six, or seven but no more than ten modifications, e.g., substitutions, insertions, or deletions, relative to SEQ ID NO: 5199; or a nucleotide sequence at least 80%, 85%, 90%, 92%, 95%, 96%, 97%, 98%, or 99% identical to SEQ ID NO: 5199;
[0445] (iv) an intron, wherein the intro comprises the nucleotide sequence of SEQ ID NO: 4475; a nucleotide sequence comprising at least one, two, three, four, five, six, or seven but no more than ten modifications, e.g., substitutions, insertions, or deletions, relative to SEQ ID NO: 4475; or a nucleotide sequence at least 80%, 80%, 85%, 90%, 92%, 95%, 96%, 97%, 98%, or 99% identical to SEQ ID NO: 4475;
[0446] (v) a nucleotide sequence encoding a modulatory polynucleotide, wherein the nucleotide sequence comprises SEQ ID NO: 4405, or nucleotide sequence at least 80%, 85%, 90%, 92%, 95%, 96%, 97%, 98%, or 99% identical thereto;
[0447] (vi) a polyA signal sequence, wherein the polyA signal sequence comprises the nucleotide sequence of SEQ ID NO: 4476; a nucleotide sequence comprising at least one, two, three, four, five, six, or seven but no more than ten modifications, e.g., substitutions, insertions, or deletions, relative to SEQ ID NO: 4476; or a nucleotide sequence at least 80%, 85%, 90%, 92%, 95%, 96%, 97%, 98%, or 99% identical to SEQ ID NO: 4476; and
[0448] (vii) an ITR, wherein the ITR comprises the nucleotide sequence of SEQ ID NO: 5200; a nucleotide sequence at least 80%, 85%, 90%, 92%, 95%, 96%, 97%, 98%, or 99% identical to SEQ ID NO: 5200; or a nucleotide sequence comprising at least one, two, three, four, five, six, or seven but no more than ten modifications, e.g., substitutions, insertions, or deletions, relative to SEQ ID NO: 5200.
   126. The AAV viral genome of any one of embodiments 12-58 or 60-122, wherein the AAV viral genome comprises in 5′ to 3′ order:
[0449] (i) an ITR, wherein the ITR comprises the nucleotide sequence of SEQ ID NO: 5197; a nucleotide sequence at least 80%, 85%, 90%, 92%, 95%, 96%, 97%, 98%, or 99% identical to SEQ ID NO: 5197; or a nucleotide sequence comprising at least one, two, three, four, five, six, or seven but no more than ten modifications, e.g., substitutions, insertions, or deletions, relative to SEQ ID NO: 5197;
[0450] (ii) an enhancer, wherein the enhancer comprises the nucleotide sequence of SEQ ID NO: 4471; a nucleotide sequence comprising at least one, two, three, four, five, six, or seven but no more than ten modifications, e.g., substitutions, insertions, or deletions, relative to SEQ ID NO: 4471; or a nucleotide sequence at least 80%, 85%, 90%, 92%, 95%, 96%, 97%, 98%, or 99% identical to SEQ ID NO: 4471;
[0451] (iii) a promoter, wherein the promoter comprises the nucleotide sequence of SEQ ID NO: 5199; a nucleotide sequence comprising at least one, two, three, four, five, six, or seven but no more than ten modifications, e.g., substitutions, insertions, or deletions, relative to SEQ ID NO: 5199; or a nucleotide sequence at least 80%, 85%, 90%, 92%, 95%, 96%, 97%, 98%, or 99% identical to SEQ ID NO: 5199;
[0452] (iv) an intron, wherein the intro comprises the nucleotide sequence of SEQ ID NO: 4475; a nucleotide sequence comprising at least one, two, three, four, five, six, or seven but no more than ten modifications, e.g., substitutions, insertions, or deletions, relative to SEQ ID NO: 4475; or a nucleotide sequence at least 80%, 80%, 85%, 90%, 92%, 95%, 96%, 97%, 98%, or 99% identical to SEQ ID NO: 4475;
[0453] (v) a nucleotide sequence encoding a modulatory polynucleotide, wherein the nucleotide sequence comprises SEQ ID NO: 4408, or nucleotide sequence at least 80%, 85%, 90%, 92%, 95%, 96%, 97%, 98%, or 99% identical thereto;
[0454] (vi) a polyA signal sequence, wherein the polyA signal sequence comprises the nucleotide sequence of SEQ ID NO: 4476; a nucleotide sequence comprising at least one, two, three, four, five, six, or seven but no more than ten modifications, e.g., substitutions, insertions, or deletions, relative to SEQ ID NO: 4476; or a nucleotide sequence at least 80%, 85%, 90%, 92%, 95%, 96%, 97%, 98%, or 99% identical to SEQ ID NO: 4476; and
[0455] (vii) an ITR, wherein the ITR comprises the nucleotide sequence of SEQ ID NO: 5200; a nucleotide sequence at least 80%, 85%, 90%, 92%, 95%, 96%, 97%, 98%, or 99% identical to SEQ ID NO: 5200; or a nucleotide sequence comprising at least one, two, three, four, five, six, or seven but no more than ten modifications, e.g., substitutions, insertions, or deletions, relative to SEQ ID NO: 5200.
   127. The AAV viral genome of any one of embodiments 12-58 or 60-122, wherein the AAV viral genome comprises in 5′ to 3′ order:
[0456] (i) an ITR, wherein the ITR comprises the nucleotide sequence of SEQ ID NO: 5197; a nucleotide sequence at least 80%, 85%, 90%, 92%, 95%, 96%, 97%, 98%, or 99% identical to SEQ ID NO: 5197; or a nucleotide sequence comprising at least one, two, three, four, five, six, or seven but no more than ten modifications, e.g., substitutions, insertions, or deletions, relative to SEQ ID NO: 5197;
[0457] (ii) an enhancer, wherein the enhancer comprises the nucleotide sequence of SEQ ID NO: 4471; a nucleotide sequence comprising at least one, two, three, four, five, six, or seven but no more than ten modifications, e.g., substitutions, insertions, or deletions, relative to SEQ ID NO: 4471; or a nucleotide sequence at least 80%, 85%, 90%, 92%, 95%, 96%, 97%, 98%, or 99% identical to SEQ ID NO: 4471;
[0458] (iii) a promoter, wherein the promoter comprises the nucleotide sequence of SEQ ID NO: 5199; a nucleotide sequence comprising at least one, two, three, four, five, six, or seven but no more than ten modifications, e.g., substitutions, insertions, or deletions, relative to SEQ ID NO: 5199; or a nucleotide sequence at least 80%, 85%, 90%, 92%, 95%, 96%, 97%, 98%, or 99% identical to SEQ ID NO: 5199;
[0459] (iv) an intron, wherein the intro comprises the nucleotide sequence of SEQ ID NO: 4475; a nucleotide sequence comprising at least one, two, three, four, five, six, or seven but no more than ten modifications, e.g., substitutions, insertions, or deletions, relative to SEQ ID NO: 4475; or a nucleotide sequence at least 80%, 80%, 85%, 90%, 92%, 95%, 96%, 97%, 98%, or 99% identical to SEQ ID NO: 4475;
[0460] (v) a nucleotide sequence encoding a modulatory polynucleotide, wherein the nucleotide sequence comprises SEQ ID NO: 4409, or nucleotide sequence at least 80%, 85%, 90%, 92%, 95%, 96%, 97%, 98%, or 99% identical thereto;
[0461] (vi) a polyA signal sequence, wherein the polyA signal sequence comprises the nucleotide sequence of SEQ ID NO: 4476; a nucleotide sequence comprising at least one, two, three, four, five, six, or seven but no more than ten modifications, e.g., substitutions, insertions, or deletions, relative to SEQ ID NO: 4476; or a nucleotide sequence at least 80%, 85%, 90%, 92%, 95%, 96%, 97%, 98%, or 99% identical to SEQ ID NO: 4476; and
[0462] (vii) an ITR, wherein the ITR comprises the nucleotide sequence of SEQ ID NO: 5200; a nucleotide sequence at least 80%, 85%, 90%, 92%, 95%, 96%, 97%, 98%, or 99% identical to SEQ ID NO: 5200; or a nucleotide sequence comprising at least one, two, three, four, five, six, or seven but no more than ten modifications, e.g., substitutions, insertions, or deletions, relative to SEQ ID NO: 5200.
   128. The AAV viral genome of any one of embodiments 12-58 or 60-122, wherein the AAV viral genome comprises in 5′ to 3′ order:
[0463] (i) an ITR, wherein the ITR comprises the nucleotide sequence of SEQ ID NO: 5197; a nucleotide sequence at least 80%, 85%, 90%, 92%, 95%, 96%, 97%, 98%, or 99% identical to SEQ ID NO: 5197; or a nucleotide sequence comprising at least one, two, three, four, five, six, or seven but no more than ten modifications, e.g., substitutions, insertions, or deletions, relative to SEQ ID NO: 5197;
[0464] (ii) an enhancer, wherein the enhancer comprises the nucleotide sequence of SEQ ID NO: 4471; a nucleotide sequence comprising at least one, two, three, four, five, six, or seven but no more than ten modifications, e.g., substitutions, insertions, or deletions, relative to SEQ ID NO: 4471; or a nucleotide sequence at least 80%, 85%, 90%, 92%, 95%, 96%, 97%, 98%, or 99% identical to SEQ ID NO: 4471;
[0465] (iii) a promoter, wherein the promoter comprises the nucleotide sequence of SEQ ID NO: 5199; a nucleotide sequence comprising at least one, two, three, four, five, six, or seven but no more than ten modifications, e.g., substitutions, insertions, or deletions, relative to SEQ ID NO: 5199; or a nucleotide sequence at least 80%, 85%, 90%, 92%, 95%, 96%, 97%, 98%, or 99% identical to SEQ ID NO: 5199;
[0466] (iv) an intron, wherein the intro comprises the nucleotide sequence of SEQ ID NO: 4475; a nucleotide sequence comprising at least one, two, three, four, five, six, or seven but no more than ten modifications, e.g., substitutions, insertions, or deletions, relative to SEQ ID NO: 4475; or a nucleotide sequence at least 80%, 80%, 85%, 90%, 92%, 95%, 96%, 97%, 98%, or 99% identical to SEQ ID NO: 4475;
[0467] (v) a nucleotide sequence encoding a modulatory polynucleotide, wherein the nucleotide sequence comprises SEQ ID NO: 4390, or nucleotide sequence at least 80%, 85%, 90%, 92%, 95%, 96%, 97%, 98%, or 99% identical thereto;
[0468] (vi) a polyA signal sequence, wherein the polyA signal sequence comprises the nucleotide sequence of SEQ ID NO: 4476; a nucleotide sequence comprising at least one, two, three, four, five, six, or seven but no more than ten modifications, e.g., substitutions, insertions, or deletions, relative to SEQ ID NO: 4476; or a nucleotide sequence at least 80%, 85%, 90%, 92%, 95%, 96%, 97%, 98%, or 99% identical to SEQ ID NO: 4476; and
[0469] (vii) an ITR, wherein the ITR comprises the nucleotide sequence of SEQ ID NO: 5200; a nucleotide sequence at least 80%, 85%, 90%, 92%, 95%, 96%, 97%, 98%, or 99% identical to SEQ ID NO: 5200; or a nucleotide sequence comprising at least one, two, three, four, five, six, or seven but no more than ten modifications, e.g., substitutions, insertions, or deletions, relative to SEQ ID NO: 5200.
   129. The AAV viral genome of any one of embodiments 12-58 or 60-122, wherein the AAV viral genome comprises in 5′ to 3′ order:
[0470] (i) an ITR, wherein the ITR comprises the nucleotide sequence of SEQ ID NO: 5197; a nucleotide sequence at least 80%, 85%, 90%, 92%, 95%, 96%, 97%, 98%, or 99% identical to SEQ ID NO: 5197; or a nucleotide sequence comprising at least one, two, three, four, five, six, or seven but no more than ten modifications, e.g., substitutions, insertions, or deletions, relative to SEQ ID NO: 5197;
[0471] (ii) an enhancer, wherein the enhancer comprises the nucleotide sequence of SEQ ID NO: 4471; a nucleotide sequence comprising at least one, two, three, four, five, six, or seven but no more than ten modifications, e.g., substitutions, insertions, or deletions, relative to SEQ ID NO: 4471; or a nucleotide sequence at least 80%, 85%, 90%, 92%, 95%, 96%, 97%, 98%, or 99% identical to SEQ ID NO: 4471;
[0472] (iii) a promoter, wherein the promoter comprises the nucleotide sequence of SEQ ID NO: 5199; a nucleotide sequence comprising at least one, two, three, four, five, six, or seven but no more than ten modifications, e.g., substitutions, insertions, or deletions, relative to SEQ ID NO: 5199; or a nucleotide sequence at least 80%, 85%, 90%, 92%, 95%, 96%, 97%, 98%, or 99% identical to SEQ ID NO: 5199;
[0473] (iv) an intron, wherein the intro comprises the nucleotide sequence of SEQ ID NO: 4475; a nucleotide sequence comprising at least one, two, three, four, five, six, or seven but no more than ten modifications, e.g., substitutions, insertions, or deletions, relative to SEQ ID NO: 4475; or a nucleotide sequence at least 80%, 80%, 85%, 90%, 92%, 95%, 96%, 97%, 98%, or 99% identical to SEQ ID NO: 4475;
[0474] (v) a nucleotide sequence encoding a modulatory polynucleotide, wherein the nucleotide sequence comprises SEQ ID NO: 4391, or nucleotide sequence at least 80%, 85%, 90%, 92%, 95%, 96%, 97%, 98%, or 99% identical thereto;
[0475] (vi) a polyA signal sequence, wherein the polyA signal sequence comprises the nucleotide sequence of SEQ ID NO: 4476; a nucleotide sequence comprising at least one, two, three, four, five, six, or seven but no more than ten modifications, e.g., substitutions, insertions, or deletions, relative to SEQ ID NO: 4476; or a nucleotide sequence at least 80%, 85%, 90%, 92%, 95%, 96%, 97%, 98%, or 99% identical to SEQ ID NO: 4476; and
[0476] (vii) an ITR, wherein the ITR comprises the nucleotide sequence of SEQ ID NO: 5200; a nucleotide sequence at least 80%, 85%, 90%, 92%, 95%, 96%, 97%, 98%, or 99% identical to SEQ ID NO: 5200; or a nucleotide sequence comprising at least one, two, three, four, five, six, or seven but no more than ten modifications, e.g., substitutions, insertions, or deletions, relative to SEQ ID NO: 5200.
   130. The AAV viral genome of any one of embodiments 12-58 or 60-122, wherein the AAV viral genome comprises in 5′ to 3′ order:
[0477] (i) an ITR, wherein the ITR comprises the nucleotide sequence of SEQ ID NO: 5197; a nucleotide sequence at least 80%, 85%, 90%, 92%, 95%, 96%, 97%, 98%, or 99% identical to SEQ ID NO: 5197; or a nucleotide sequence comprising at least one, two, three, four, five, six, or seven but no more than ten modifications, e.g., substitutions, insertions, or deletions, relative to SEQ ID NO: 5197;
[0478] (ii) an enhancer, wherein the enhancer comprises the nucleotide sequence of SEQ ID NO: 4471; a nucleotide sequence comprising at least one, two, three, four, five, six, or seven but no more than ten modifications, e.g., substitutions, insertions, or deletions, relative to SEQ ID NO: 4471; or a nucleotide sequence at least 80%, 85%, 90%, 92%, 95%, 96%, 97%, 98%, or 99% identical to SEQ ID NO: 4471;
[0479] (iii) a promoter, wherein the promoter comprises the nucleotide sequence of SEQ ID NO: 5199; a nucleotide sequence comprising at least one, two, three, four, five, six, or seven but no more than ten modifications, e.g., substitutions, insertions, or deletions, relative to SEQ ID NO: 5199; or a nucleotide sequence at least 80%, 85%, 90%, 92%, 95%, 96%, 97%, 98%, or 99% identical to SEQ ID NO: 5199;
[0480] (iv) an intron, wherein the intro comprises the nucleotide sequence of SEQ ID NO: 4475; a nucleotide sequence comprising at least one, two, three, four, five, six, or seven but no more than ten modifications, e.g., substitutions, insertions, or deletions, relative to SEQ ID NO: 4475; or a nucleotide sequence at least 80%, 80%, 85%, 90%, 92%, 95%, 96%, 97%, 98%, or 99% identical to SEQ ID NO: 4475;
[0481] (v) a nucleotide sequence encoding a modulatory polynucleotide, wherein the nucleotide sequence comprises SEQ ID NO: 4393, or nucleotide sequence at least 80%, 85%, 90%, 92%, 95%, 96%, 97%, 98%, or 99% identical thereto;
[0482] (vi) a polyA signal sequence, wherein the polyA signal sequence comprises the nucleotide sequence of SEQ ID NO: 4476; a nucleotide sequence comprising at least one, two, three, four, five, six, or seven but no more than ten modifications, e.g., substitutions, insertions, or deletions, relative to SEQ ID NO: 4476; or a nucleotide sequence at least 80%, 85%, 90%, 92%, 95%, 96%, 97%, 98%, or 99% identical to SEQ ID NO: 4476; and
[0483] (vii) an ITR, wherein the ITR comprises the nucleotide sequence of SEQ ID NO: 5200; a nucleotide sequence at least 80%, 85%, 90%, 92%, 95%, 96%, 97%, 98%, or 99% identical to SEQ ID NO: 5200; or a nucleotide sequence comprising at least one, two, three, four, five, six, or seven but no more than ten modifications, e.g., substitutions, insertions, or deletions, relative to SEQ ID NO: 5200.
   131. The AAV viral genome of any one of embodiments 12-58 or 60-122, wherein the AAV viral genome comprises in 5′ to 3′ order:
[0484] (i) an ITR, wherein the ITR comprises the nucleotide sequence of SEQ ID NO: 5197; a nucleotide sequence at least 80%, 85%, 90%, 92%, 95%, 96%, 97%, 98%, or 99% identical to SEQ ID NO: 5197; or a nucleotide sequence comprising at least one, two, three, four, five, six, or seven but no more than ten modifications, e.g., substitutions, insertions, or deletions, relative to SEQ ID NO: 5197;
[0485] (ii) an enhancer, wherein the enhancer comprises the nucleotide sequence of SEQ ID NO: 4471; a nucleotide sequence comprising at least one, two, three, four, five, six, or seven but no more than ten modifications, e.g., substitutions, insertions, or deletions, relative to SEQ ID NO: 4471; or a nucleotide sequence at least 80%, 85%, 90%, 92%, 95%, 96%, 97%, 98%, or 99% identical to SEQ ID NO: 4471;
[0486] (iii) a promoter, wherein the promoter comprises the nucleotide sequence of SEQ ID NO: 5199; a nucleotide sequence comprising at least one, two, three, four, five, six, or seven but no more than ten modifications, e.g., substitutions, insertions, or deletions, relative to SEQ ID NO: 5199; or a nucleotide sequence at least 80%, 85%, 90%, 92%, 95%, 96%, 97%, 98%, or 99% identical to SEQ ID NO: 5199;
[0487] (iv) an intron, wherein the intro comprises the nucleotide sequence of SEQ ID NO: 4475; a nucleotide sequence comprising at least one, two, three, four, five, six, or seven but no more than ten modifications, e.g., substitutions, insertions, or deletions, relative to SEQ ID NO: 4475; or a nucleotide sequence at least 80%, 80%, 85%, 90%, 92%, 95%, 96%, 97%, 98%, or 99% identical to SEQ ID NO: 4475;
[0488] (v) a nucleotide sequence encoding a modulatory polynucleotide, wherein the nucleotide sequence comprises SEQ ID NO: 4394, or nucleotide sequence at least 80%, 85%, 90%, 92%, 95%, 96%, 97%, 98%, or 99% identical thereto;
[0489] (vi) a polyA signal sequence, wherein the polyA signal sequence comprises the nucleotide sequence of SEQ ID NO: 4476; a nucleotide sequence comprising at least one, two, three, four, five, six, or seven but no more than ten modifications, e.g., substitutions, insertions, or deletions, relative to SEQ ID NO: 4476; or a nucleotide sequence at least 80%, 85%, 90%, 92%, 95%, 96%, 97%, 98%, or 99% identical to SEQ ID NO: 4476; and
[0490] (vii) an ITR, wherein the ITR comprises the nucleotide sequence of SEQ ID NO: 5200; a nucleotide sequence at least 80%, 85%, 90%, 92%, 95%, 96%, 97%, 98%, or 99% identical to SEQ ID NO: 5200; or a nucleotide sequence comprising at least one, two, three, four, five, six, or seven but no more than ten modifications, e.g., substitutions, insertions, or deletions, relative to SEQ ID NO: 5200.
   132. The AAV viral genome of any one of embodiments 12-58 or 60-122, wherein the AAV viral genome comprises in 5′ to 3′ order:
[0491] (i) an ITR, wherein the ITR comprises the nucleotide sequence of SEQ ID NO: 4469; a nucleotide sequence at least 80%, 85%, 90%, 92%, 95%, 96%, 97%, 98%, or 99% identical to SEQ ID NO: 4469; or a nucleotide sequence comprising at least one, two, three, four, five, six, or seven but no more than ten modifications, e.g., substitutions, insertions, or deletions, relative to SEQ ID NO: 4469;
[0492] (ii) an enhancer, wherein the enhancer comprises the nucleotide sequence of SEQ ID NO: 4472; a nucleotide sequence comprising at least one, two, three, four, five, six, or seven but no more than ten modifications, e.g., substitutions, insertions, or deletions, relative to SEQ ID NO: 4472; or a nucleotide sequence at least 80%, 85%, 90%, 92%, 95%, 96%, 97%, 98%, or 99% identical to SEQ ID NO: 4472;
[0493] (iii) a promoter, wherein the promoter comprises the nucleotide sequence of SEQ ID NO: 5199; a nucleotide sequence comprising at least one, two, three, four, five, six, or seven but no more than ten modifications, e.g., substitutions, insertions, or deletions, relative to SEQ ID NO: 5199; or a nucleotide sequence at least 80%, 85%, 90%, 92%, 95%, 96%, 97%, 98%, or 99% identical to SEQ ID NO: 5199;
[0494] (iv) an intron, wherein the intro comprises the nucleotide sequence of SEQ ID NO: 4475; a nucleotide sequence comprising at least one, two, three, four, five, six, or seven but no more than ten modifications, e.g., substitutions, insertions, or deletions, relative to SEQ ID NO: 4475; or a nucleotide sequence at least 80%, 80%, 85%, 90%, 92%, 95%, 96%, 97%, 98%, or 99% identical to SEQ ID NO: 4475;
[0495] (v) a nucleotide sequence encoding a modulatory polynucleotide, wherein the nucleotide sequence comprises any one of SEQ ID NOs: 4380-4409 or 5027-5050, or nucleotide sequence at least 80%, 85%, 90%, 92%, 95%, 96%, 97%, 98%, or 99% identical thereto;
[0496] (vi) a polyA signal sequence, wherein the polyA signal sequence comprises the nucleotide sequence of SEQ ID NO: 4476; a nucleotide sequence comprising at least one, two, three, four, five, six, or seven but no more than ten modifications, e.g., substitutions, insertions, or deletions, relative to SEQ ID NO: 4476; or a nucleotide sequence at least 80%, 85%, 90%, 92%, 95%, 96%, 97%, 98%, or 99% identical to SEQ ID NO: 4476; and
[0497] (vii) an ITR, wherein the ITR comprises the nucleotide sequence of SEQ ID NO: 4470; a nucleotide sequence at least 80%, 85%, 90%, 92%, 95%, 96%, 97%, 98%, or 99% identical to SEQ ID NO: 4470; or a nucleotide sequence comprising at least one, two, three, four, five, six, or seven but no more than ten modifications, e.g., substitutions, insertions, or deletions, relative to SEQ ID NO: 4470.
   133. The AAV viral genome of any one of embodiments 12-58 or 60-132, which comprises the nucleotide sequence of any one of SEQ ID NOs: 4439-4468 or 5149-5196, or a nucleotide sequence at least 70%, 75%, 80%, 85%, 90%, 92%, 95%, 96%, 97%, 98%, or 99% identical to any one of SEQ ID NOs: 4439-4468 or 5149-5196.
   134. The AAV viral genome of any one of embodiments 12-58, 60-96, 98-108, or 110-133, which comprises the nucleotide sequence of any one of SEQ ID NOs: 5149-5196, or a nucleotide sequence at least 70%, 75%, 80%, 85%, 90%, 92%, 95%, 96%, 97%, 98%, or 99% identical to any one of SEQ ID NOs: 5149-5196.
   135. The AAV viral genome of any one of embodiments 12-58, 60-96, 98-108, 110-133, or 134, which comprises the nucleotide sequence of any one of SEQ ID NOs: 5173, 5195, 5196, 5182, 5183, 5184, or 5185, or a nucleotide sequence at least 70%, 75%, 80%, 85%, 90%, 92%, 95%, 96%, 97%, 98%, or 99% identical to any one of SEQ ID NOs: 5173, 5195, 5196, 5182, 5183, 5184, or 5185.
   136. The AAV viral genome of any one of embodiments 12-58, 60-96, 98-108, 110-125, or 133-135, which comprises the nucleotide sequence of SEQ ID NO: 5173, or a nucleotide sequence at least 70%, 75%, 80%, 85%, 90%, 92%, 95%, 96%, 97%, 98%, or 99% identical to SEQ ID NO: 5173.
   137. The AAV viral genome of any one of embodiments 12-58, 60-96, 98-108, 110-124, 126, or 133-135, which comprises the nucleotide sequence of SEQ ID NO: 5195, or a nucleotide sequence at least 70%, 75%, 80%, 85%, 90%, 92%, 95%, 96%, 97%, 98%, or 99% identical to SEQ ID NO: 5195.
   138. The AAV viral genome of any one of embodiments 12-58, 60-96, 98-108, 110-124, 127, or 133-135, which comprises the nucleotide sequence of SEQ ID NO: 5196, or a nucleotide sequence at least 70%, 75%, 80%, 85%, 90%, 92%, 95%, 96%, 97%, 98%, or 99% identical to SEQ ID NO: 5196.
   139. The AAV viral genome of any one of embodiments 12-58, 60-96, 98-108, 110-124, 128, or 133-135, which comprises the nucleotide sequence of SEQ ID NO: 5182, or a nucleotide sequence at least 70%, 75%, 80%, 85%, 90%, 92%, 95%, 96%, 97%, 98%, or 99% identical to SEQ ID NO: 5182.
   140. The AAV viral genome of any one of embodiments 12-58, 60-96, 98-108, 110-124, 129, or 133-135, which comprises the nucleotide sequence of SEQ ID NO: 5183, or a nucleotide sequence at least 70%, 75%, 80%, 85%, 90%, 92%, 95%, 96%, 97%, 98%, or 99% identical to SEQ ID NO: 5183.
   141. The AAV viral genome of any one of embodiments 12-58, 60-96, 98-108, 110-124, 130, or 133-135, which comprises the nucleotide sequence of SEQ ID NO: 5184, or a nucleotide sequence at least 70%, 75%, 80%, 85%, 90%, 92%, 95%, 96%, 97%, 98%, or 99% identical to SEQ ID NO: 5184.
   142. The AAV viral genome of any one of embodiments 12-58, 60-96, 98-108, 110-124, 131, or 133-135, which comprises the nucleotide sequence of SEQ ID NO: 5185, or a nucleotide sequence at least 70%, 75%, 80%, 85%, 90%, 92%, 95%, 96%, 97%, 98%, or 99% identical to SEQ ID NO: 5185.
   143. The AAV viral genome of any one of embodiments 12-58, 60-96, 98-107, 109-122, or 133, which comprises the nucleotide sequence of any one of SEQ ID NOs: 4439-4468, or a nucleotide sequence at least 70%, 75%, 80%, 85%, 90%, 92%, 95%, 96%, 97%, 98%, or 99% identical to any one of SEQ ID NOs: 4439-4468.
   144. An AAV particle comprising the AAV viral genome of any one of embodiments 12-58 or 60-143, an AAV viral genome encoding the modulatory polynucleotide of any one of embodiments 59-90, or an AAV viral genome encoding the siRNA of any one of embodiments 11 or 13-58, and an AAV capsid protein.
   145. The AAV particle of embodiment 48, wherein the AAV capsid protein comprises an AAV5 capsid protein, an AAV9 capsid protein, VOY101 capsid protein, a PHPeB capsid protein, a PHP.B capsid protein, a PHP.N capsid protein, an AAV1 capsid protein, a VOY9P39 capsid protein, an AAV2 capsid protein, an AAVrh 10 capsid protein, or a variant thereof (e.g., an AAV9 capsid protein or a variant thereof or an AAV5 capsid protein or variant thereof).
   146. The AAV particle of embodiment 144 or 145, wherein the AAV capsid protein comprises an AAV9 capsid or variant thereof.
   147. The AAV particle of embodiment 144 or 145, wherein the AAV capsid protein comprises an AAV5 capsid or variant thereof.
   148. The AAV particle of any one of embodiments 144-147, wherein:
[0498] (i) the AAV capsid protein comprises an amino acid sequence provided in Table 1 or an amino acid sequence at least 70%, 75%, 80%, 85%, 90%, 92%, 95%, 97%, 98%, or 99% identical thereto; or
[0499] (ii) the nucleotide sequence encoding the AAV capsid protein comprises any one of the nucleotide sequences in Table 1, or a nucleotide sequence at least 70%, 75%, 80%, 85%, 90%, 92%, 95%, 97%, 98%, or 99% identical thereto.
   149. A vector comprising the AAV viral genome of any one of embodiments 12-58 or 60-143, a nucleotide sequence encoding the modulatory polynucleotide of any one of embodiments 59-90, or a nucleotide sequence encoding the siRNA of any one of embodiments 11 or 13-58.
   150. A cell comprising the AAV particle of any one of embodiments 144-148, the AAV viral genome of any one of embodiments 12-58 or 60-143, the modulatory polynucleotide of any one of embodiments 59-90, or the siRNA of any one of embodiments 11 or 13-58.
   151. The cell of embodiment 150, wherein the cell is a mammalian cell or an insect cell.
   152. The cell of embodiment 150 or 151, wherein the cell is a cell of a brain region or a spinal cord region (e.g., a CNS cell).
   153. The cell of any one of embodiments 150-152, wherein the cell is a cell of the cortex, hippocampus, thalamus, or brainstem.
   154. The cell of any one of embodiments 150-153, wherein the cell is a neuron, a glial cell, or an oligodendrocyte.
   155. A method of making an AAV particle, comprising:
[0500] (i) providing a host cell comprising the AAV viral genome of any one of embodiments 12-58 or 60-143, an AAV viral genome encoding the modulatory polynucleotide of any one of embodiments 59-90, or a viral genome encoding the siRNA of any one of embodiments 11 or 13-58;
[0501] (ii) incubating the host cell under conditions suitable to enclose the AAV viral genome in an AAV capsid protein;
[0502] thereby making the AAV particle.
   156. The method of embodiment 155, further comprising, prior to step (i), introducing a first nucleic acid molecule comprising the viral genome into the host cell.
   157. The method of embodiment 155 or 156, wherein the host cell comprises a second nucleic acid encoding the AAV capsid protein.
   158. The method of embodiment 157, wherein the second nucleic acid molecule is introduced into the host cell prior to, concurrently with, or after the first nucleic acid molecule.
   159. A pharmaceutical composition comprising the AAV particle of any one of embodiments 144-148, an AAV particle comprising the AAV viral genome of any one of embodiments 12-58 or 60-143, the modulatory polynucleotide of any one of embodiments 59-90, or the siRNA of any one of embodiments 11 or 13-58, and a pharmaceutically acceptable excipient.
   160. A method of delivering an siRNA for inhibiting MAPT expression (e.g., MAPT gene, mRNA, or protein expression) to a cell, comprising administering an effective amount of the pharmaceutical composition of embodiment 159, the AAV particle of any one of embodiments 144-159, an AAV particle comprising the AAV viral genome of any one of embodiments 12-58 or 60-143, the modulatory polynucleotide of any one of embodiments 59-90, or the siRNA of any one of embodiments 11 or 13-58, thereby delivering the siRNA for inhibiting MAPT expression to the cell.
   161. The method of embodiment 160, wherein the cell is a cell of a brain region or a spinal cord region.
   162. The method of embodiment 160 or 161, wherein the cell is a cell of the cortex, hippocampus, thalamus, or brainstem.
   163. The method of any one of embodiments 160-162, wherein the cell is a neuron, an astrocyte, a glial cell, or an oligodendrocyte.
   164. The method of any one of embodiments 160-163, wherein delivery decreases (e.g., inhibits) MAPT mRNA levels, e.g., by at least 40%, 44%, 45%, 50%, 55%, 60%, 64%, 65%, 70%, 75%, 76%, 79%, 80%, 84%, 85%, 87%, or 90%, e.g., in a cell of a brain region (e.g., cortex, hippocampus, or brain stem), e.g., as compared to a reference level (e.g., the mRNA levels in a cell that has not been delivered or prior to delivering the AAV particle, modulatory polynucleotide, siRNA, or pharmaceutical composition), e.g., when measured by an assay (e.g., an assay as described in Example 6).
   165. The method of any one of embodiments 160-164, wherein delivery decreases (e.g., inhibits) MAPT protein levels, e.g., by at least 15%, 17%, 20%, 25%, 30%, 35%, 37%, 40%, 44%, 45%, 46%, 50%, 53%, 55%, 60%, 63%, 64%, 65%, 70%, 72%, 74%, or 75%, e.g., in a cell of a brain region (e.g., cortex, hippocampus, thalamus, or brain stem), e.g., as compared to a reference level (e.g., the protein levels in a cells that has not been delivered or prior to delivering the AAV particle, modulatory polynucleotide, siRNA, or pharmaceutical composition), e.g., when measured by an assay (e.g., an assay as described in Example 6).
   166. The method of any one of embodiments 160-165, wherein the cell is in a subject.
   167. The method of embodiment 166, wherein the subject has or has been diagnosed with having a genetic disorder (e.g., a monogenic disorder or a polygenic disorder).
   168. The method of embodiment 166 or 167, wherein the subject has or has been diagnosed with having a neurological disorder (e.g., a neurodegenerative disorder).
   169. The method of any one of embodiments 166-168, wherein the subject has or has been diagnosed with having a disorder associated with tau expression, e.g., aberrant tau expression.
   170. The method of any one of embodiments 166-169, wherein the subject has or has been diagnosed with having a tauopathy.
   171. A method of treating a subject having or diagnosed with having a genetic disorder, e.g., a monogenic disorder or a polygenic disorder, comprising administering to the subject an effective amount of the pharmaceutical composition of embodiment 159, the AAV particle of any one of embodiments 144-159, an AAV particle comprising the AAV viral genome of any one of embodiments 12-58 or 60-143, the modulatory polynucleotide of any one of embodiments 59-90, or the siRNA of any one of embodiments 11 or 13-58, thereby treating the subject having or diagnosed with having the genetic disorder, e.g., the monogenic disorder or the polygenic disorder.
   172. A method of treating a subject having or diagnosed with having a neurological disorder (e.g., a neurodegenerative disorder), comprising administering to the subject an effective amount of the pharmaceutical composition of embodiment 159, the AAV particle of any one of embodiments 144-159, an AAV particle comprising the AAV viral genome of any one of embodiments 12-58 or 60-143, the modulatory polynucleotide of any one of embodiments 59-90, or the siRNA of any one of embodiments 11 or 13-58, thereby treating the subject having or diagnosed with having the neurological disorder (e.g., the neurodegenerative disorder).
   173. A method of treating a subject having or diagnosed with having a disorder associated with tau expression, e.g., aberrant tau expression, comprising administering to the subject an effective amount of the pharmaceutical composition of embodiment 159, the AAV particle of any one of embodiments 144-159, an AAV particle comprising the AAV viral genome of any one of embodiments 12-58 or 60-143, the modulatory polynucleotide of any one of embodiments 59-90, or the siRNA of any one of embodiments 11 or 13-58, thereby treating the subject having or diagnosed with having the disorder associate with tau expression, e.g., aberrant tau expression.
   174. A method of treating a subject having or diagnosed with having a tauopathy, comprising administering to the subject an effective amount of the pharmaceutical composition of embodiment 159, the AAV particle of any one of embodiments 144-159, an AAV particle comprising the AAV viral genome of any one of embodiments 12-58 or 60-143, the modulatory polynucleotide of any one of embodiments 59-90, or the siRNA of any one of embodiments 11 or 13-58, thereby treating the subject having or diagnosed with having the tauopathy.
   175. The method of any one of embodiments 167-174, wherein the genetic disorder, neurological disorder (e.g., neurodegenerative disorder), disorder associated with tau expression (e.g., aberrant tau expression), and/or tauopathy is Alzheimer's disease (AD), Frontotemporal dementia (FTD), frontotemporal dementia and parkinsonism linked to chromosome 17 (FTDP-17), frontotemporal lobar degeneration (FTLD), Dravet syndrome (DS), neurodegenerative disease, traumatic brain injury (TBI), chronic traumatic encephalopathy (CTE), progressive supranuclear palsy (PSP), Down's syndrome, Pick's disease, corticobasal degeneration (CBD), corticobasal syndrome, amyotrophic lateral sclerosis (ALS), Prion diseases, CJD, Multiple system atrophy, mild cognitive impairment, Tangle-only dementia, or Progressive subcortical gliosis.
   176. The method of any one of embodiments 171-175, wherein treating comprises prevention of progression of the genetic disorder, neurological disorder (e.g., neurodegenerative disorder), disorder associated with tau expression (e.g., aberrant tau expression), and/or tauopathy in the subject.
   177. The method of any one of embodiments 171-176, further comprising performing a blood test, an imaging test (e.g., a PET scan or a PET scan in combination with biomarker, e.g., serum biomarker staining), a CNS biopsy sample, or an aqueous cerebral spinal fluid biopsy, optionally wherein the blood test, imaging test, biopsy sample, or aqueous cerebral spinal fluid biopsy is performed prior to, during, or after treatment with the AAV particle, modulatory polynucleotide, siRNA, or pharmaceutical composition.
   178. The method of any one of embodiments 160-177, wherein administration decreases, e.g., reduces or inhibits, expression of a MAPT gene, mRNA, and/or protein.
   179. The method of embodiments 178, wherein the MAPT gene, mRNA, and/or protein is a wild-type MAPT gene, mRNA, or protein.
   180. The method of embodiment 178 or 179, wherein the MAPT gene, mRNA, and/or protein is a mutated MAPT gene, mRNA, or protein (e.g., comprises at least 1 mutation).
   181. The method of any one of embodiments 171-180, wherein administration of the AAV particle, modulatory polynucleotide, siRNA, or pharmaceutical composition results in a reduction and/or prevention of tau pathology, e.g., a decrease in a biomarker of tau pathology (e.g., ¹⁸F-flortaucipir, plasma ptau 181, or ¹⁸F-PM-PBB3), e.g., as measured by a PET scan or PET scan in combination with Braak neuropathological staging and/or serum biomarker staining, e.g., as compared to a reference (e.g., a subject that as not received the AAV particle, modulatory polynucleotide, siRNA, or pharmaceutical composition).
   182. The method of any one of embodiments 171-181, wherein the administration decreases MAPT mRNA levels in the subject, e.g., by at least 40%, 44%, 45%, 50%, 55%, 60%, 64%, 65%, 70%, 75%, 76%, 79%, 80%, 84%, 85%, 87%, or 90%, e.g., in a cell of a brain region (e.g., cortex, hippocampus, or brain stem), e.g., as compared to a reference level (e.g., the mRNA levels in a subject that has not received or prior to receiving the AAV particle, modulatory polynucleotide, siRNA, or pharmaceutical composition), e.g., when measured by an assay (e.g., an assay as described in Example 6).
   183. The method of any one of embodiments 171-182, wherein the administration decreases MAPT protein levels in the subject, e.g., by at least 15%, 17%, 20%, 25%, 30%, 35%, 37%, 40%, 44%, 45%, 46%, 50%, 53%, 55%, 60%, 63%, 64%, 65%, 70%, 72%, 74%, or 75%, e.g., in a cell of a brain region (e.g., cortex, hippocampus, thalamus, or brain stem), e.g., as compared to a reference level (e.g., the protein levels in a subject that has not received or prior to receiving the AAV particle, modulatory polynucleotide, siRNA, or pharmaceutical composition), e.g., when measured by an assay (e.g., an assay as described in Example 6).
   184. The method of any one of embodiments 166-183, wherein the subject is a human.
   185. The method of any one of embodiments 166-184, wherein the pharmaceutical composition, AAV particle, modulatory polynucleotide, or siRNA are administered to the subject intravenously, intramuscularly, via intraparenchymal administration, intracerebroventricularly, via intra-cisterna magna (ICM) injection, intrathecally, via focused ultrasound (FUS), e.g., coupled with the intravenous administration of microbubbles (FUS-MB), or MRI-guided FUS coupled with intravenous administration.
   186. The method of any one of embodiments 166-185, wherein the pharmaceutical composition, AAV particle, modulatory polynucleotide, or siRNA are administered to the subject intravenously.
   187. The method of any one of embodiments 166-186, wherein the pharmaceutical composition, AAV particle, modulatory polynucleotide, or siRNA are administered to the subject via intra-cisterna magna injection (ICM).
   188. The method of any one of embodiments 166-187, wherein the pharmaceutical composition, AAV particle, modulatory polynucleotide, or siRNA are administered to the subject intrathecally. 189. The pharmaceutical composition of embodiment 159, the AAV particle of any one of embodiments 144-159, an AAV particle comprising the AAV viral genome of any one of embodiments 12-58 or 60-143, the modulatory polynucleotide of any one of embodiments 59-90, or the siRNA of any one of embodiments 11 or 13-58 for use in a method of delivering an siRNA for inhibiting MAPT expression to a cell.
   190. The pharmaceutical composition of embodiment 159, the AAV particle of any one of embodiments 144-159, an AAV particle comprising the AAV viral genome of any one of embodiments 12-58 or 60-143, the modulatory polynucleotide of any one of embodiments 59-90, or the siRNA of any one of embodiments 11 or 13-58, for use in the manufacture of a medicament.
   191. The pharmaceutical composition of embodiment 159, the AAV particle of any one of embodiments 144-159, an AAV particle comprising the AAV viral genome of any one of embodiments 12-58 or 60-143, the modulatory polynucleotide of any one of embodiments 59-90, or the siRNA of any one of embodiments 11 or 13-58, for use in the treatment of a genetic disorder, neurological disorder (e.g., neurodegenerative disorder), disorder associated with tau expression (e.g., aberrant tau expression), and/or tauopathy.
   192. Use of the pharmaceutical composition of embodiment 159, the AAV particle of any one of embodiments 144-159, an AAV particle comprising the AAV viral genome of any one of embodiments 12-58 or 60-143, the modulatory polynucleotide of any one of embodiments 59-90, or the siRNA of any one of embodiments 11 or 13-58, in the manufacture of a medicament for delivering an siRNA for inhibiting MAPT expression to a cell.
   193. Use of the pharmaceutical composition of embodiment 159, the AAV particle of any one of embodiments 144-159, an AAV particle comprising the AAV viral genome of any one of embodiments 12-58 or 60-143, the modulatory polynucleotide of any one of embodiments 59-90, or the siRNA of any one of embodiments 11 or 13-58, in the manufacture of a medicament.
   194. Use of the pharmaceutical composition of embodiment 159, the AAV particle of any one of embodiments 144-159, an AAV particle comprising the AAV viral genome of any one of embodiments 12-58 or 60-143, the modulatory polynucleotide of any one of embodiments 59-90, or the siRNA of any one of embodiments 11 or 13-58, in the manufacture of a medicament for treating a genetic disorder, neurological disorder (e.g., neurodegenerative disorder), disorder associated with tau expression (e.g., aberrant tau expression), and/or tauopathy.

### BRIEF DESCRIPTION OF THE DRAWINGS

[0503] FIG. 1 is a graph depicting the relative R/F activity as % over non-target control (NTC) on the Y-axis post-transfection with the modulatory polynucleotide constructs targeting MAPT indicated on the X-axis (from left to right: VOYTaumiR-102-530 (SEQ ID NO: 4380), VOYTaumiR-102-556 (SEQ ID NO: 4381), VOYTaumiR-102-579 (SEQ ID NO: 4383), VOYTaumiR-102-586 (SEQ ID NO: 4384), VOYTaumiR-104-530 (SEQ ID NO: 4385), VOYTaumiR-104-556 (SEQ ID NO: 4386), VOYTaumiR-104-579 (SEQ ID NO: 4388), VOYTaumiR-104-586 (SEQ ID NO: 4389), VOYTaumiR-109-530 (SEQ ID NO: 4390), VOYTaumiR-109-556 (SEQ ID NO: 4391), VOYTaumiR-109-579 (SEQ ID NO: 4393), VOYTaumiR-109-586 (SEQ ID NO: 4394), VOYTaumiR-114-530 (SEQ ID NO: 4395), VOYTaumiR-114-556 (SEQ ID NO: 4396), VOYTaumiR-114-579 (SEQ ID NO: 4398), VOYTaumiR-114-586 (SEQ ID NO: 4399), VOYTaumiR-116-530 (SEQ ID NO: 4400), VOYTaumiR-116-556 (SEQ ID NO: 4401), VOYTaumiR-116-579 (SEQ ID NO: 4403), VOYTaumiR-116-586 (SEQ ID NO: 4404), VOYTaumiR-127-530 (SEQ ID NO: 4405), VOYTaumiR-127-556 (SEQ ID NO: 4406), VOYTaumiR-127-579 (SEQ ID NO: 4408), and VOYTaumiR-127-586 (SEQ ID NO: 4409)).

[0504] FIG. 2 is a graph showing the fold-change in MAPT mRNA remaining for each vectorized modulatory polynucleotide relative to the non-target control (fold change relative to NTC) on the Y-axis post-transfection with the modulatory polynucleotide constructs targeting MAPT indicated on the X-axis (from left to right: mock, non-target control (NTC), VOYTaumiR-127-530 (SEQ ID NO: 4405), VOYTaumiR-127-556 (SEQ ID NO: 4406), VOYTaumiR-127-579 (SEQ ID NO: 4408), VOYTaumiR-127-586 (SEQ ID NO: 4409), VOYTaumiR-116-530 (SEQ ID NO: 4400), VOYTaumiR-116-556 (SEQ ID NO: 4401), VOYTaumiR-116-579 (SEQ ID NO: 4403), VOYTaumiR-116-586 (SEQ ID NO: 4404), VOYTaumiR-114-530 (SEQ ID NO: 4395), VOYTaumiR-114-556 (SEQ ID NO: 4396), VOYTaumiR-114-579 (SEQ ID NO: 4398), VOYTaumiR-114-586 (SEQ ID NO: 4399), VOYTaumiR-109-530 (SEQ ID NO: 4390), VOYTaumiR-109-556 (SEQ ID NO: 4391), VOYTaumiR-109-579 (SEQ ID NO: 4393), VOYTaumiR-109-586 (SEQ ID NO: 4394), VOYTaumiR-104-530 (SEQ ID NO: 4385), VOYTaumiR-104-556 (SEQ ID NO: 4386), VOYTaumiR-104-579 (SEQ ID NO: 4388), VOYTaumiR-104-586 (SEQ ID NO: 4389), VOYTaumiR-102-530 (SEQ ID NO: 4380), VOYTaumiR-102-556 (SEQ ID NO: 4381), VOYTaumiR-102-579 (SEQ ID NO: 4383), and VOYTaumiR-102-586 (SEQ ID NO: 4384)).

[0505] FIG. 3 is a graph showing the fold-change in MAPT mRNA remaining for each vectorized modulatory polynucleotide relative to the non-target control (fold change relative to NTC) on the Y-axis post-transfection with increasing concentrations (0.05 μg, 0.16 μg, 0.50 μg, or 1.50 μg per well) of the modulatory polynucleotides on the X-axis (from left to right: mock, non-target control (NTC), VOYTaumiR-127-530 (SEQ ID NO: 4405), VOYTaumiR-127-556 (SEQ ID NO: 4406), VOYTaumiR-127-579 (SEQ ID NO: 4408), VOYTaumiR-127-586 (SEQ ID NO: 4409), VOYTaumiR-109-530 (SEQ ID NO: 4390), VOYTaumiR-109-556 (SEQ ID NO: 4391), VOYTaumiR-109-579 (SEQ ID NO: 4393), VOYTaumiR-109-586 (SEQ ID NO: 4394), VOYTaumiR-116-579 (SEQ ID NO: 4403), VOYTaumiR-104-556 (SEQ ID NO: 4386), and VOYTaumiR-104-586 (SEQ ID NO: 4389)).

[0506] FIG. 4 is a graph depicting the fold-change in MAPT mRNA remaining for each vectorized modulatory polynucleotide relative to the non-target control (fold change relative to NTC) on the Y-axis post-transfection with the indicated concentrations (0.5 μg or 1.0 μg) of the modulatory polynucleotides on the X-axis (from left to right: mock, GFP, NTC, MAPT antisense oligonucleotide (ASO) positive control, VOYTaumiR-127-530 (SEQ ID NO: 4405), VOYTaumiR-109-530 (SEQ ID NO: 4390), VOYTaumiR-102-582 (SEQ ID NO: 5027), VOYTaumiR-104-582 (SEQ ID NO: 5031), VOYTaumiR-109-582 (SEQ ID NO: 5035), VOYTaumiR-114-582 (SEQ ID NO: 5039), VOYTaumiR-127-582 (SEQ ID NO: 5047), VOYTaumiR-102-587 (SEQ ID NO: 5028), VOYTaumiR-109-587 (SEQ ID NO: 5036), VOYTaumiR-114-587 (SEQ ID NO: 5040), VOYTaumiR-104-552 (SEQ ID NO: 5033), VOYTaumiR-104-549 (SEQ ID NO: 5034), and VOYTaumiR-116-549 (SEQ ID NO: 5046).

[0507] FIGS. 5A-5E are a series of graphs depicting the vector genome copies per diploid cells in the cortex (FIG. 5A), hippocampus (FIG. 5B), brainstem (FIG. 5C), thalamus (FIG. 5D), or liver (FIG. 5E) of mice following intravenous injection of the vehicle control or AAV particles comprising the VOY9P39 capsid encoding the VOYTaumiR-127-530 modulatory polynucleotide (VOY9P39_127-530) at a dose of 3e12 vg/kg, 1e13 vg/kg, or 3e13 vg/kg. Statistical significance was evaluated with a one-way ANOVA with Tukey's multiple comparisons post-hoc test: *, **, ***, and **** indicate p<0.05, 0.005, 0.0005 and 0.0001, respectively. Data are shown as the group mean±SEM. The numbers above the bars indicate the group mean in vg/dg (biodistribution).

[0508] FIGS. 6A-6D are a series of graphs depicting the fold-change in MAPT mRNA levels remaining post-treatment in each treatment group relative to the vehicle on the Y-axis, in the cortex (FIG. 6A), hippocampus (FIG. 6B), thalamus (FIG. 6C), or brainstem (FIG. 6D) of mice following intravenous injection of AAV particles comprising the payload and capsid combinations indicated on the X-axis, which are from left to right: vehicle control, VOY9P39 capsid and mCherry reporter control at 3e13 vg/kg, VOY9P39 capsid and non-target control (NTC) at 3e13 vg/kg, VOY9P39 capsid and VOYTaumiR-127-530 modulatory polynucleotide (127-530) at 3e12 vg/kg, VOY9P39 capsid and VOYTaumiR-127-530 modulatory polynucleotide (127-530) at 1e13 vg/kg, VOY9P39 capsid and VOYTaumiR-127-530 modulatory polynucleotide (127-530) at 3e13 vg/kg, VOY101 capsid and mCherry reporter control at 3e13 vg/kg, and VOY101 capsid and VOYTaumiR-127-530 modulatory polynucleotide (127-530) at 3e13 vg/kg. Statistical significance was evaluated with a one-way ANOVA with Tukey's multiple comparison with p-value as shown on the graphs.

[0509] FIGS. 7A-7D are a series of graphs depicting the MAPT protein levels remaining post-treatment in each treatment group relative to the vehicle in the cortex (FIG. 7A), hippocampus (FIG. 7B), thalamus (FIG. 7C), or brainstem (FIG. 7D) of mice following intravenous injection of the vehicle control (vehicle); or AAV particles comprising the VOY9P39 capsid encoding VOYTaumiR-127-530 modulatory polynucleotide (127-530) administered at a dose of 3e12 vg/kg, 1e13 vg/kg, or 3e13 vg/kg. The percentages above the bars represent the percent knockdown of tau protein following treatment. Statistical significance was evaluated with a one-way ANOVA with Tukey's multiple comparison.

[0510] FIGS. 8A-8D are a series of graphs depicting the MAPT mRNA levels remaining post-treatment in each treatment group relative to the vehicle in the cortex (FIG. 8A), hippocampus (FIG. 8B), thalamus (FIG. 8C), or brainstem (FIG. 8D) of mice following intravenous injection of the vehicle control (vehicle); AAV particles comprising the VOY9P39 capsid encoding the non-target control (NTC) at dose of 1e13 vg/kg (C9P39-NTC_1E13); AAV particles comprising the VOY9P39 capsid encoding the VOYTaumiR-127-530 modulatory polynucleotide at a dose of 1e12 vg/kg (C9P39-127.530_1E12) or 1e13 vg/kg (C9P39-127.530_1E13); or AAV particles comprising the VOY9P39 capsid encoding the VOYTaumiR-127-579 modulatory polynucleotide at a dose of 1e13 vg/kg (C9P39-127.579_1E13). Statistical significance was evaluated with a one-way ANOVA with Tukey's multiple comparison with p-value as shown on the graphs.

### DETAILED DESCRIPTION

[0511] Described herein, inter alia, are compositions comprising isolated, e.g., recombinant, viral particles, e.g., AAV particles, for delivery, e.g., vectorized delivery, of an RNA agent for targeting MAPT (e.g., a siRNA duplex for targeting MAPT) and methods of making and using the same. In some embodiments, the RNA agent for targeting MAPT is siRNA duplex that modulates, e.g., inhibits MAPT expression, e.g., a siRNA duplex for targeting MAPT as described herein. Generally, the recombinant AAV particles will include a viral genome comprising a nucleotide sequence, e.g., encoding a transgene encoding an RNA agent for targeting MAPT (e.g., a siRNA duplex for targeting MAPT) and an AAV capsid protein, e.g., an AAV capsid variant described herein.

[0512] Mutations in the MAPT gene were identified in the autosomal dominantly inherited tauopathy frontotemporal dementia and parkinsonism linked to chromosome 17 (FTDP-17), which demonstrates that mutations in the MAPT gene and/or tau protein could lead to neurodegenerative changes in the brain. Mutant tau is considered more amyloidogenic than wild-type tau, meaning it is more likely to become hyperphosphorylated and to aggregate as NFT (Hutton, M. et al., 1998, Nature 393(6686):702-5), and these NFT can be composed of pathological forms of tau including, but not limited to, hyperphosphorylated, misfolded and aggregated tau species, each of which has yielded a set of avidly pursued targets. Hyperphosphorylation of tau depresses its binding to microtubules and microtubule assembly/stability activity. Further, hyperphosphorylation of tau renders it prone to misfolding and aggregation. Without wishing to be bound by theory, it is believed in some embodiments that administration of an siRNA targeting MAPT (e.g., a mutated MAPT gene or a wild-type MAPT gene), e.g., a siRNA for targeting MAPT described herein, and vectorized forms thereof, can reduce tau, e.g., pathological tau, protein expression, aggregation, hyperphosphorylation, and/or misfolding, thereby modulating, e.g., reducing or slowing, pathology associated with aberrant tau expression and/or tauopathies (e.g., Alzheimer's disease (AD), frontotemporal dementia (FTD), and/or Dravet syndrome (DS)).

[0513] Without wishing to be bound by theory, it is believed in some embodiments, that the use of an AAV particle or plurality of AAV particles for the vectorized delivery of an RNA agent for targeting MAPT (e.g., a siRNA duplex for targeting MAPT) described herein would lead to increased exposure in the central nervous system (CNS), and robust expression of the RNA agent targeting MAPT in the subject, e.g., a subject having or diagnosed with having a disease associated with expression of tau or a neurological disorder described herein (e.g., a tauopathy).

### I. COMPOSITIONS

[0514] According to the present disclosure, compositions for delivering a functional RNA agent for targeting MAPT by adeno-associated virus particles (AAVs), e.g., an AAV particle comprising an AAV capsid polypeptide are provided. In some embodiments, an AAV particle, e.g., an AAV particle comprising a an AAV capsid polypeptide, as described herein, or plurality of particles, may be provided, e.g., delivered, via any of several routes of administration (e.g., via intravenous administration), to a cell, tissue, organ, or organism, in vivo, ex vivo, or in vitro

### Adeno-Associated Viruses (AAVs) and AAV Particles

[0515] Described herein, inter alia, are compositions comprising isolated, e.g., recombinant, viral particles, e.g., AAV particles, for delivery, e.g., vectorized delivery, of a polynucleotide, e.g., a MAPT targeting siRNA, and methods of making and using the same.

[0516] In some embodiments, an adeno-associated virus (AAV) comprises a small non-enveloped icosahedral capsid virus of the Parvoviridae family and is characterized by a single stranded DNA viral genome. The parvoviruses and other members of the Parvoviridae family are generally described in Kenneth I. Berns, “Parvoviridae: The Viruses and Their Replication,” Chapter 69 in FIELDS VIROLOGY (3d Ed. 1996), the contents of which are incorporated by reference in their entirety. In some embodiments, AAV is capable of replication in vertebrate hosts including, but not limited to, human, primate, bovine, canine, equine, and ovine species

[0517] In some embodiments, an AAV particle is used as a biological tool due to a relatively simple structure, their ability to infect a wide range of cells (including quiescent and dividing cells) without integration into the host genome and without replicating, and their relatively benign immunogenic profile. The genome of the virus may be manipulated to contain a minimum of components for the assembly of a functional recombinant virus, or viral particle, which is loaded with or engineered to target a particular tissue and express or deliver a desired payload, e.g., a polynucleotide encoding a siRNA for targeting MAPT.

[0518] In some embodiments, the AAV particle is a naturally occurring (e.g., wild-type) AAV or a recombinant AAV. In some embodiments, the wild-type AAV viral genome is a linear, single-stranded DNA (ssDNA) molecule approximately 5,000 nucleotides (nt) in length. In some embodiments, inverted terminal repeats (ITRs) cap the viral genome at both the 5′ and the 3′ end, providing origins of replication for the viral genome. In some embodiments, an AAV viral genome typically comprises two ITR sequences. These ITRs have a characteristic T-shaped hairpin structure defined by a self-complementary region (145nt in wild-type AAV) at the 5′ and 3′ ends of the ssDNA which form an energetically stable double stranded region. The double stranded hairpin structures comprise multiple functions including, but not limited to, acting as an origin for DNA replication by functioning as primers for the endogenous DNA polymerase complex of the host viral replication cell.

[0519] In some embodiments, the AAV particle, e.g., an AAV particle (e.g., ssAAVs) described herein comprises a viral genome that is self-complementary (scAAV). In some embodiments, the ssAAV comprises nucleic acid molecules, e.g., DNA strands, that anneal together to form double stranded DNA. In some embodiments, a scAAV allows for rapid expression in a transduced cell as it bypasses second strand synthesis.

[0520] In some embodiments, the wild-type AAV viral genome further comprises nucleotide sequences for two open reading frames, one for the four non-structural Rep proteins (Rep78, Rep68, Rep52, Rep40, encoded by Rep genes) and one for the three capsid, or structural, proteins (VP1, VP2, VP3, encoded by capsid genes or Cap genes). The Rep proteins are used for replication and packaging, while the capsid proteins are assembled to create the protein shell of the AAV, or AAV capsid polypeptide, e.g., an AAV capsid variant. Alternative splicing and alternate initiation codons and promoters result in the generation of four different Rep proteins from a single open reading frame and the generation of three capsid proteins from a single open reading frame. Though it varies by AAV serotype, as a non-limiting example, for AAV9 (SEQ ID NO: 138) VP1 refers to amino acids 1-736, VP2 refers to amino acids 138-736, and VP3 refers to amino acids 203-736. In other words, VP1 is the full-length capsid sequence, while VP2 and VP3 are shorter components of the whole. As a result, changes in the sequence in the VP3 region, are also changes to VP1 and VP2, however, the percent difference as compared to the parent sequence will be greatest for VP3 since it is the shortest sequence of the three. Though described here in relation to the amino acid sequence, the nucleic acid sequence encoding these proteins can be similarly described. Together, the three capsid proteins assemble to create the “AAV capsid” protein. While not wishing to be bound by theory, the AAV capsid protein typically comprises a molar ratio of 1:1:10 of VP1:VP2:VP3. In some embodiments, a viral genome of a wild-type, e.g., naturally occurring, AAV can be modified to replace the rep/cap sequences with a nucleic acid comprising a transgene encoding a payload, e.g., an antibody molecule, wherein the genetic element comprises at least one ITR region. In some embodiments, the viral genome of a recombinant AAV comprises two ITR regions, e.g., a 5′ITR or a 3′ITR. In some embodiments, the rep/cap sequences can be provided in trans during production to generate AAV particles. In some embodiments, the viral genome of an AAV is comprised in an AAV vector, which further encodes a capsid protein e.g., a structural protein, wherein the capsid protein comprises a VP1 polypeptide, a VP2 polypeptide, and/or a VP3 polypeptide; and/or a Rep protein, e.g., a non-structural protein, wherein the Rep protein comprises a Rep78 protein, a Rep68, Rep52 protein, and/or a Rep40 protein.

[0521] In some embodiments, AAV particles of the present disclosure are recombinant AAV particles which are replication defective and lacking the nucleotide sequences encoding functional Rep and Cap proteins. In some embodiments, these defective AAV particles may lack most or all parental coding sequences and carry only one or two AAV ITR sequences and the nucleic acid of interest for delivery to a cell, a tissue, an organ, or an organism.

[0522] Methods for producing and/or modifying AAV particles are disclosed in the art such as pseudotyped AAV particles (PCT Patent Publication Nos. WO200028004; WO200123001; WO2004112727; WO2005005610; and WO2005072364, the content of each of which is incorporated herein by reference in its entirety).

[0523] As described herein, the AAV particles of the disclosure comprising an AAV capsid polypeptide, and a viral genome are capable of providing, e.g., delivering, a transgene to a cell, e.g., mammalian cell ad/or a subject. In some embodiments, the recombinant AAV particles of the present disclosure are capable of vectorized delivery of a siRNA (e.g., an siRNA for targeting MAPT).

AAV Capsids and Variants thereof.

[0524] In some embodiments, an AAV particle, e.g., an AAV particle for the vectorized delivery of an siRNA described herein (e.g., an siRNA for targeting MAPT), may comprise an AAV capsid polypeptide, e.g., an AAV capsid variant.

[0525] In some embodiments, the AAV capsid polypeptide, e.g., AAV capsid variant, allows for blood brain barrier penetration following intravenous administration. In some embodiments, the AAV capsid, e.g., AAV capsid variant, allows for blood brain barrier penetration following focused ultrasound (FUS), e.g., coupled with the intravenous administration of microbubbles (FUS-MB), or MRI-guided FUS coupled with intravenous administration. In some embodiments the AAV capsid, e.g., AAV capsid variant allows for increased distribution to a brain region. In some embodiments, the brain region comprises a frontal cortex, sensory cortex, motor cortex, caudate, dentate nucleus, cerebellar cortex, cerebral cortex, brain stem, hippocampus, thalamus, putamen, or a combination thereof. In some embodiments, the AAV capsid, e.g., AAV capsid variant allows for preferential transduction in a brain region relative to the transduction in the dorsal root ganglia (DRG).

[0526] In some embodiments the AAV capsid polypeptide, e.g., AAV capsid variant allows for increased distribution to a spinal cord region. In some embodiments, the spinal region comprises a cervical spinal cord region, thoracic spinal cord region, and/or lumbar spinal cord region.

[0527] In some embodiments, the AAV capsid polypeptide, e.g., an AAV capsid variant comprises a VOY101 capsid polypeptide, a PHPeB capsid polypeptide, an AAVPHP.B (PHP.B) capsid polypeptide, a AAVPHP.N (PHP.N) capsid polypeptide, an AAV1 capsid polypeptide, an AAV2 capsid polypeptide, an AAV5 capsid polypeptide, an AAV9 capsid polypeptide, an AAV9 K449R capsid polypeptide, an AAVrh10 capsid polypeptide, or a functional variant thereof. In some embodiments, the AAV capsid polypeptide, e.g., AAV capsid variant, comprises an amino acid sequence of any of the AAV capsid polypeptides in Table 1, or an amino acid sequence substantially identical (e.g., having at least 70%, 75%, 80%, 85%, 90%, 92%, 95%, 97%, 98%, or 99% sequence identity) thereto. In some embodiments, the nucleotide sequence encoding the AAV capsid polypeptide comprises any one of the nucleotide sequences in Table 1, or a nucleotide sequence substantially identical (e.g., having at least 70%, 75%, 80%, 85%, 90%, 92%, 95%, 97%, 98%, or 99% sequence identity) thereto.

TABLE 1
Exemplary full length capsid sequences

| | SEQ | |
|---|---|---|
| | ID | |
| Description | NO: | Sequence Information |
| VOY101 | 1 | MAADGYLPDWLEDNLSEGIREWWALKPGAPQPKANQQHQDNARGLVLPGYKYLGPGNGL |
| | | DKGEPVNAADAAALEHDKAYDQQLKAGDNPYLKYNHADAEFQERLKEDTSFGGNLGRAV |
| | | FQAKKRLLEPLGLVEEAAKTAPGKKRPVEQSPQEPDSSAGIGKSGAQPAKKRLNFGQTG |
| | | DTESVPDPQPIGEPPAAPSGVGSLTMASGGGAPVADNNEGADGVGSSSGNWHCDSQWLG |
| | | DRVITTSTRTWALPTYNNHLYKQISNSTSGGSSNDNAYFGYSTPWGYFDFNRFHCHFSP |
| | | RDWQRLINNNWGFRPKRLNFKLFNIQVKEVTDNNGVKTIANNLTSTVQVFTDSDYQLPY |
| | | VLGSAHEGCLPPFPADVFMIPQYGYLTLNDGSQAVGRSSFYCLEYFPSQMLRTGNNFQF |
| | | SYEFENVPFHSSYAHSQSLDRLMNPLIDQYLYYLSKTINGSGQNQQTLKFSVAGPSNMA |
| | | VQGRNYIPGPSYRQQRVSTTVTQNNNSEFAWPGASSWALNGRNSLMNPGPAMASHKEGE |
| | | DRFFPLSGSLIFGKQGTGRDNVDADKVMITNEEEIKTTNPVATESYGQVATNHQSDGTL |
| | | AVPFKAQAQTGWVQNQGILPGMVWQDRDVYLQGPIWAKIPHTDGNFHPSPLMGGFGMKH |
| | | PPPQILIKNTPVPADPPTAFNKDKLNSFITQYSTGQVSVEIEWELQKENSKRWNPEIQY |
| | | TSNYYKSNNVEFAVNTEGVYSEPRPIGTRYLTRNL |
| AAV9/hu.14 | 11 | MAADGYLPDWLEDNLSEGIREWWALKPGAPQPKANQQHQDNARGLVLPGYKYLGPGNGL |
| K449R | | DKGEPVNAADAAALEHDKAYDQQLKAGDNPYLKYNHADAEFQERLKEDTSFGGNLGRAV |
| | | FQAKKRLLEPLGLVEEAAKTAPGKKRPVEQSPQEPDSSAGIGKSGAQPAKKRLNFGQTG |
| | | DTESVPDPQPIGEPPAAPSGVGSLTMASGGGAPVADNNEGADGVGSSSGNWHCDSQWLG |
| | | DRVITTSTRTWALPTYNNHLYKQISNSTSGGSSNDNAYFGYSTPWGYFDFNRFHCHFSP |
| | | RDWQRLINNNWGFRPKRLNFKLFNIQVKEVTDNNGVKTIANNLTSTVQVFTDSDYQLPY |
| | | VLGSAHEGCLPPFPADVFMIPQYGYLTLNDGSQAVGRSSFYCLEYFPSQMLRTGNNFQF |
| | | SYEFENVPFHSSYAHSQSLDRLMNPLIDQYLYYLSRTINGSGQNQQTLKFSVAGPSNMA |
| | | VQGRNYIPGPSYRQQRVSTTVTQNNNSEFAWPGASSWALNGRNSLMNPGPAMASHKEGE |
| | | DRFFPLSGSLIFGKQGTGRDNVDADKVMITNEEEIKTTNPVATESYGQVATNHQSAQAQ |
| | | AQTGWVQNQGILPGMVWQDRDVYLQGPIWAKIPHTDGNFHPSPLMGGFGMKHPPPQILI |
| | | KNTPVPADPPTAFNKDKLNSFITQYSTGQVSVEIEWELQKENSKRWNPEIQYTSNYYKS |
| | | NNVEFAVNTEGVYSEPRPIGTRYLTRNL |
| AAV9/hu.14 | 138 | MAADGYLPDWLEDNLSEGIREWWALKPGAPQPKANQQHQDNARGLVLPGYKYLGPGNGL |
| WT | | DKGEPVNAADAAALEHDKAYDQQLKAGDNPYLKYNHADAEFQERLKEDTSFGGNLGRAV |
| (amino acid) | | FQAKKRLLEPLGLVEEAAKTAPGKKRPVEQSPQEPDSSAGIGKSGAQPAKKRLNFGQTG |
| | | DTESVPDPQPIGEPPAAPSGVGSLTMASGGGAPVADNNEGADGVGSSSGNWHCDSQWLG |
| | | DRVITTSTRTWALPTYNNHLYKQISNSTSGGSSNDNAYFGYSTPWGYFDFNRFHCHFSP |
| | | RDWQRLINNNWGFRPKRLNFKLFNIQVKEVTDNNGVKTIANNLTSTVQVFTDSDYQLPY |
| | | VLGSAHEGCLPPFPADVFMIPQYGYLTLNDGSQAVGRSSFYCLEYFPSQMLRTGNNFQF |
| | | SYEFENVPFHSSYAHSQSLDRLMNPLIDQYLYYLSKTINGSGQNQQTLKFSVAGPSNMA |
| | | VQGRNYIPGPSYRQQRVSTTVTQNNNSEFAWPGASSWALNGRNSLMNPGPAMASHKEGE |
| | | DRFFPLSGSLIFGKQGTGRDNVDADKVMITNEEEIKTTNPVATESYGQVATNHQSAQAQ |
| | | AQTGWVQNQGILPGMVWQDRDVYLQGPIWAKIPHTDGNFHPSPLMGGFGMKHPPPQILI |
| | | KNTPVPADPPTAFNKDKLNSFITQYSTGQVSVEIEWELQKENSKRWNPEIQYTSNYYKS |
| | | NNVEFAVNTEGVYSEPRPIGTRYLTRNL |
| AAV9/hu.14 | 137 | ATGGCTGCCGATGGTTATCTTCCAGATTGGCTCGAGGACAACCTTAGTGAAGGAATTCG |
| WT | | CGAGTGGTGGGCTTTGAAACCTGGAGCCCCTCAACCCAAGGCAAATCAACAACATCAAG |
| (DNA) | | ACAACGCTCGAGGTCTTGTGCTTCCGGGTTACAAATACCTTGGACCCGGCAACGGACTC |
| | | GACAAGGGGGAGCCGGTCAACGCAGCAGACGCGGCGGCCCTCGAGCACGACAAGGCCTA |
| | | CGACCAGCAGCTCAAGGCCGGAGACAACCCGTACCTCAAGTACAACCACGCCGACGCCG |
| | | AGTTCCAGGAGCGGCTCAAAGAAGATACGTCTTTTGGGGGCAACCTCGGGCGAGCAGTC |
| | | TTCCAGGCCAAAAAGAGGCTTCTTGAACCTCTTGGTCTGGTTGAGGAAGCGGCTAAGAC |
| | | GGCTCCTGGAAAGAAGAGGCCTGTAGAGCAGTCTCCTCAGGAACCGGACTCCTCCGCGG |
| | | GTATTGGCAAATCGGGTGCACAGCCCGCTAAAAAGAGACTCAATTTCGGTCAGACTGGC |
| | | GACACAGAGTCAGTCCCAGACCCTCAACCAATCGGAGAACCTCCCGCAGCCCCCTCAGG |
| | | TGTGGGATCTCTTACAATGGCTTCAGGTGGTGGCGCACCAGTGGCAGACAATAACGAAG |
| | | GTGCCGATGGAGTGGGTAGTTCCTCGGGAAATTGGCATTGCGATTCCCAATGGCTGGGG |
| | | GACAGAGTCATCACCACCAGCACCCGAACCTGGGCCCTGCCCACCTACAACAATCACCT |
| | | CTACAAGCAAATCTCCAACAGCACATCTGGAGGATCTTCAAATGACAACGCCTACTTCG |
| | | GCTACAGCACCCCCTGGGGGTATTTTGACTTCAACAGATTCCACTGCCACTTCTCACCA |
| | | CGTGACTGGCAGCGACTCATCAACAACAACTGGGGATTCCGGCCTAAGCGACTCAACTT |
| | | CAAGCTCTTCAACATTCAGGTCAAAGAGGTTACGGACAACAATGGAGTCAAGACCATCG |
| | | CCAATAACCTTACCAGCACGGTCCAGGTCTTCACGGACTCAGACTATCAGCTCCCGTAC |
| | | GTGCTCGGGTCGGCTCACGAGGGCTGCCTCCCGCCGTTCCCAGCGGACGTTTTCATGAT |
| | | TCCTCAGTACGGGTATCTGACGCTTAATGATGGAAGCCAGGCCGTGGGTCGTTCGTCCT |
| | | TTTACTGCCTGGAATATTTCCCGTCGCAAATGCTAAGAACGGGTAACAACTTCCAGTTC |
| | | AGCTACGAGTTTGAGAACGTACCTTTCCATAGCAGCTACGCTCACAGCCAAAGCCTGGA |
| | | CCGACTAATGAATCCACTCATCGACCAATACTTGTACTATCTCTCAAAGACTATTAACG |
| | | GTTCTGGACAGAATCAACAAACGCTAAAATTCAGTGTGGCCGGACCCAGCAACATGGCT |
| | | GTCCAGGGAAGAAACTACATACCTGGACCCAGCTACCGACAACAACGTGTCTCAACCAC |
| | | TGTGACTCAAAACAACAACAGCGAATTTGCTTGGCCTGGAGCTTCTTCTTGGGCTCTCA |
| | | ATGGACGTAATAGCTTGATGAATCCTGGACCTGCTATGGCCAGCCACAAAGAAGGAGAG |
| | | GACCGTTTCTTTCCTTTGTCTGGATCTTTAATTTTTGGCAAACAAGGAACTGGAAGAGA |
| | | CAACGTGGATGCGGACAAAGTCATGATAACCAACGAAGAAGAAATTAAAACTACTAACC |
| | | CGGTAGCAACGGAGTCCTATGGACAAGTGGCCACAAACCACCAGAGTGCCCAAGCACAG |
| | | GCGCAGACCGGCTGGGTTCAAAACCAAGGAATACTTCCGGGTATGGTTTGGCAGGACAG |
| | | AGATGTGTACCTGCAAGGACCCATTTGGGCCAAAATTCCTCACACGGACGGCAACTTTC |
| | | ACCCTTCTCCGCTGATGGGAGGGTTTGGAATGAAGCACCCGCCTCCTCAGATCCTCATC |
| | | AAAAACACACCTGTACCTGCGGATCCTCCAACGGCCTTCAACAAGGACAAGCTGAACTC |
| | | TTTCATCACCCAGTATTCTACTGGCCAAGTCAGCGTGGAGATCGAGTGGGAGCTGCAGA |
| | | AGGAAAACAGCAAGCGCTGGAACCCGGAGATCCAGTACACTTCCAACTATTACAAGTCT |
| | | AATAATGTTGAATTTGCTGTTAATACTGAAGGTGTATATAGTGAACCCCGCCCCATTGG |
| | | CACCAGATACCTGACTCGTAATCTGTAA |
| PHP.eB | 3 | MAADGYLPDWLEDNLSEGIREWWALKPGAPQPKANQQHQDNARGLVLPGYKYLGPGNGL |
| (amino acid) | | DKGEPVNAADAAALEHDKAYDQQLKAGDNPYLKYNHADAEFQERLKEDTSFGGNLGRAV |
| | | FQAKKRLLEPLGLVEEAAKTAPGKKRPVEQSPQEPDSSAGIGKSGAQPAKKRLNFGQTG |
| | | DTESVPDPQPIGEPPAAPSGVGSLTMASGGGAPVADNNEGADGVGSSSGNWHCDSQWLG |
| | | DRVITTSTRTWALPTYNNHLYKQISNSTSGGSSNDNAYFGYSTPWGYFDFNRFHCHFSP |
| | | RDWQRLINNNWGFRPKRLNFKLFNIQVKEVTDNNGVKTIANNLTSTVQVFTDSDYQLPY |
| | | VLGSAHEGCLPPFPADVFMIPQYGYLTLNDGSQAVGRSSFYCLEYFPSQMLRTGNNFQF |
| | | SYEFENVPFHSSYAHSQSLDRLMNPLIDQYLYYLSRTINGSGQNQQTLKFSVAGPSNMA |
| | | VQGRNYIPGPSYRQQRVSTTVTQNNNSEFAWPGASSWALNGRNSLMNPGPAMASHKEGE |
| | | DRFFPLSGSLIFGKQGTGRDNVDADKVMITNEEEIKTTNPVATESYGQVATNHQSDGTL |
| | | AVPFKAQAQTGWVQNQGILPGMVWQDRDVYLQGPIWAKIPHTDGNFHPSPLMGGFGMKH |
| | | PPPQILIKNTPVPADPPTAFNKDKLNSFITQYSTGQVSVEIEWELQKENSKRWNPEIQY |
| | | TSNYYKSNNVEFAVNTEGVYSEPRPIGTRYLTRNL |
| PHP.B | 12 | MAADGYLPDWLEDNLSEGIREWWALKPGAPQPKANQQHQDNARGLVLPGYKYLGPGNGL |
| (amino acid) | | DKGEPVNAADAAALEHDKAYDQQLKAGDNPYLKYNHADAEFQERLKEDTSFGGNLGRAV |
| | | FQAKKRLLEPLGLVEEAAKTAPGKKRPVEQSPQEPDSSAGIGKSGAQPAKKRLNFGQTG |
| | | DTESVPDPQPIGEPPAAPSGVGSLTMASGGGAPVADNNEGADGVGSSSGNWHCDSQWLG |
| | | DRVITTSTRTWALPTYNNHLYKQISNSTSGGSSNDNAYFGYSTPWGYFDFNRFHCHFSP |
| | | RDWQRLINNNWGFRPKRLNFKLFNIQVKEVTDNNGVKTIANNLTSTVQVFTDSDYQLPY |
| | | VLGSAHEGCLPPFPADVFMIPQYGYLTLNDGSQAVGRSSFYCLEYFPSQMLRTGNNFQF |
| | | SYEFENVPFHSSYAHSQSLDRLMNPLIDQYLYYLSRTINGSGQNQQTLKFSVAGPSNMA |
| | | VQGRNYIPGPSYRQQRVSTTVTQNNNSEFAWPGASSWALNGRNSLMNPGPAMASHKEGE |
| | | DRFFPLSGSLIFGKQGTGRDNVDADKVMITNEEEIKTTNPVATESYGQVATNHQSAQTL |
| | | AVPFKAQAQTGWVQNQGILPGMVWQDRDVYLQGPIWAKIPHTDGNFHPSPLMGGFGMKH |
| | | PPPQILIKNTPVPADPPTAFNKDKLNSFITQYSTGQVSVEIEWELQKENSKRWNPEIQY |
| | | TSNYYKSNNVEFAVNTEGVYSEPRPIGTRYLTRNL |
| PHP.N | 13 | MAADGYLPDWLEDNLSEGIREWWALKPGAPQPKANQQHQDNARGLVLPGYKYLGPGNGL |
| (amino acid) | | DKGEPVNAADAAALEHDKAYDQQLKAGDNPYLKYNHADAEFQERLKEDTSFGGNLGRAV |
| | | FQAKKRLLEPLGLVEEAAKTAPGKKRPVEQSPQEPDSSAGIGKSGAQPAKKRLNFGQTG |
| | | DTESVPDPQPIGEPPAAPSGVGSLTMASGGGAPVADNNEGADGVGSSSGNWHCDSQWLG |
| | | DRVITTSTRTWALPTYNNHLYKQISNSTSGGSSNDNAYFGYSTPWGYFDFNRFHCHFSP |
| | | RDWQRLINNNWGFRPKRLNFKLFNIQVKEVTDNNGVKTIANNLTSTVQVFTDSDYQLPY |
| | | VLGSAHEGCLPPFPADVFMIPQYGYLTLNDGSQAVGRSSFYCLEYFPSQMLRTGNNFQF |
| | | SYEFENVPFHSSYAHSQSLDRLMNPLIDQYLYYLSRTINGSGQNQQTLKFSVAGPSNMA |
| | | VQGRNYIPGPSYRQQRVSTTVTQNNNSEFAWPGASSWALNGRNSLMNPGPAMASHKEGE |
| | | DRFFPLSGSLIFGKQGTGRDNVDADKVMITNEEEIKTTNPVATESYGQVATNHQSAQTL |
| | | AVPFSNPAQTGWVQNQGILPGMVWQDRDVYLQGPIWAKIPHTDGNFHPSPLMGGFGMKH |
| | | PPPQILIKNTPVPADPPTAFNKDKLNSFITQYSTGQVSVEIEWELQKENSKRWNPEIQY |
| | | TSNYYKSNNVEFAVNTEGVYSEPRPIGTRYLTRNL |
| AAVrh10 | | MAADGYLPDWLEDNLSEGIREWWDLKPGAPKPKANQQKQDDGRGLVLPGYKYLGPFNGL |
| (amino acid) | 14 | DKGEPVNAADAAALEHDKAYDQQLKAGDNPYLRYNHADAEFQERLQEDTSFGGNLGRAV |
| | | FQAKKRVLEPLGLVEEGAKTAPGKKRPVEPSPQRSPDSSTGIGKKGQQPAKKRLNFGQT |
| | | GDSESVPDPQPIGEPPAGPSGLGSGTMAAGGGAPMADNNEGADGVGSSSGNWHCDSTWL |
| | | GDRVITTSTRTWALPTYNNHLYKQISNGTSGGSTNDNTYFGYSTPWGYFDFNRFHCHFS |
| | | PRDWQRLINNNWGFRPKRLNFKLFNIQVKEVTQNEGTKTIANNLTSTIQVFTDSEYQLP |
| | | YVLGSAHQGCLPPFPADVFMIPQYGYLTLNNGSQAVGRSSFYCLEYFPSQMLRTGNNFE |
| | | FSYQFEDVPFHSSYAHSQSLDRLMNPLIDQYLYYLSRTQSTGGTAGTQQLLFSQAGPNN |
| | | MSAQAKNWLPGPCYRQQRVSTTLSQNNNSNFAWTGATKYHLNGRDSLVNPGVAMATHKD |
| | | DEERFFPSSGVLMFGKQGAGKDNVDYSSVMLTSEEEIKTTNPVATEQYGVVADNLQQQN |
| | | AAPIVGAVNSQGALPGMVWQNRDVYLQGPIWAKIPHTDGNFHPSPLMGGFGLKHPPPQI |
| | | LIKNTPVPADPPTTFSQAKLASFITQYSTGQVSVEIEWELQKENSKRWNPEIQYTSNYY |
| | | KSTNVDFAVNTDGTYSEPRPIGTRYLTRNL |
| AAVrh10 | 15 | ATGGCTGCCGATGGTTATCTTCCAGATTGGCTCGAGGACAACCTCTCTGAGGGCATTCG |
| (DNA) | | CGAGTGGTGGGACTTGAAACCTGGAGCCCCGAAACCCAAAGCCAACCAGCAAAAGCAGG |
| | | ACGACGGCCGGGGTCTGGTGCTTCCTGGCTACAAGTACCTCGGACCCTTCAACGGACTC |
| | | GACAAGGGGGAGCCCGTCAACGCGGCGGACGCAGCGGCCCTCGAGCACGACAAGGCCTA |
| | | CGACCAGCAGCTCAAAGCGGGTGACAATCCGTACCTGCGGTATAACCACGCCGACGCCG |
| | | AGTTTCAGGAGCGTCTGCAAGAAGATACGTCTTTTGGGGGCAACCTCGGGCGAGCAGTC |
| | | TTCCAGGCCAAGAAGCGGGTTCTCGAACCTCTCGGTCTGGTTGAGGAAGGCGCTAAGAC |
| | | GGCTCCTGGAAAGAAGAGACCGGTAGAGCCATCACCCCAGCGTTCTCCAGACTCCTCTA |
| | | CGGGCATCGGCAAGAAAGGCCAGCAGCCCGCGAAAAAGAGACTCAACTTTGGGCAGACT |
| | | GGCGACTCAGAGTCAGTGCCCGACCCTCAACCAATCGGAGAACCCCCCGCAGGCCCCTC |
| | | TGGTCTGGGATCTGGTACAATGGCTGCAGGCGGTGGCGCTCCAATGGCAGACAATAACG |
| | | AAGGCGCCGACGGAGTGGGTAGTTCCTCAGGAAATTGGCATTGCGATTCCACATGGCTG |
| | | GGCGACAGAGTCATCACCACCAGCACCCGAACCTGGGCCCTCCCCACCTACAACAACCA |
| | | CCTCTACAAGCAAATCTCCAACGGGACTTCGGGAGGAAGCACCAACGACAACACCTACT |
| | | TCGGCTACAGCACCCCCTGGGGGTATTTTGACTTTAACAGATTCCACTGCCACTTCTCA |
| | | CCACGTGACTGGCAGCGACTCATCAACAACAACTGGGGATTCCGGCCCAAGAGACTCAA |
| | | CTTCAAGCTCTTCAACATCCAGGTCAAGGAGGTCACGCAGAATGAAGGCACCAAGACCA |
| | | TCGCCAATAACCTTACCAGCACGATTCAGGTCTTTACGGACTCGGAATACCAGCTCCCG |
| | | TACGTCCTCGGCTCTGCGCACCAGGGCTGCCTGCCTCCGTTCCCGGCGGACGTCTTCAT |
| | | GATTCCTCAGTACGGGTACCTGACTCTGAACAATGGCAGTCAGGCCGTGGGCCGTTCCT |
| | | CCTTCTACTGCCTGGAGTACTTTCCTTCTCAAATGCTGAGAACGGGCAACAACTTTGAG |
| | | TTCAGCTACCAGTTTGAGGACGTGCCTTTTCACAGCAGCTACGCGCACAGCCAAAGCCT |
| | | GGACCGGCTGATGAACCCCCTCATCGACCAGTACCTGTACTACCTGTCTCGGACTCAGT |
| | | CCACGGGAGGTACCGCAGGAACTCAGCAGTTGCTATTTTCTCAGGCCGGGCCTAATAAC |
| | | ATGTCGGCTCAGGCCAAAAACTGGCTACCCGGGCCCTGCTACCGGCAGCAACGCGTCTC |
| | | CACGACACTGTCGCAAAATAACAACAGCAACTTTGCCTGGACCGGTGCCACCAAGTATC |
| | | ATCTGAATGGCAGAGACTCTCTGGTAAATCCCGGTGTCGCTATGGCAACCCACAAGGAC |
| | | GACGAAGAGCGATTTTTTCCGTCCAGCGGAGTCTTAATGTTTGGGAAACAGGGAGCTGG |
| | | AAAAGACAACGTGGACTATAGCAGCGTTATGCTAACCAGTGAGGAAGAAATTAAAACCA |
| | | CCAACCCAGTGGCCACAGAACAGTACGGCGTGGTGGCCGATAACCTGCAACAGCAAAAC |
| | | GCCGCTCCTATTGTAGGGGCCGTCAACAGTCAAGGAGCCTTACCTGGCATGGTCTGGCA |
| | | GAACCGGGACGTGTACCTGCAGGGTCCTATCTGGGCCAAGATTCCTCACACGGACGGAA |
| | | ACTTTCATCCCTCGCCGCTGATGGGAGGCTTTGGACTGAAACACCCGCCTCCTCAGATC |
| | | CTGATTAAGAATACACCTGTTCCCGCGGATCCTCCAACTACCTTCAGTCAAGCTAAGCT |
| | | GGCGTCGTTCATCACGCAGTACAGCACCGGACAGGTCAGCGTGGAAATTGAATGGGAGC |
| | | TGCAGAAAGAAAACAGCAAACGCTGGAACCCAGAGATTCAATACACTTCCAACTACTAC |
| | | AAATCTACAAATGTGGACTTTGCTGTTAACACAGATGGCACTTATTCTGAGCCTCGCCC |
| | | CATCGGCACCCGTTACCTCACCCGTAATCTGTAA |
| AAV2 | 16 | MAADGYLPDWLEDTLSEGIRQWWKLKPGPPPPKPAERHKDDSRGLVLPGYKYLGPFNGL |
| (amino acid) | | DKGEPVNEADAAALEHDKAYDRQLDSGDNPYLKYNHADAEFQERLKEDTSFGGNLGRAV |
| | | FQAKKRVLEPLGLVEEPVKTAPGKKRPVEHSPVEPDSSSGTGKAGQQPARKRLNFGQTG |
| | | DADSVPDPQPLGQPPAAPSGLGTNTMATGSGAPMADNNEGADGVGNSSGNWHCDSTWMG |
| | | DRVITTSTRTWALPTYNNHLYKQISSQSGASNDNHYFGYSTPWGYFDFNRFHCHFSPRD |
| | | WQRLINNNWGFRPKRLNFKLFNIQVKEVTQNDGTTTIANNLTSTVQVFTDSEYQLPYVL |
| | | GSAHQGCLPPFPADVFMVPQYGYLTLNNGSQAVGRSSFYCLEYFPSQMLRTGNNFTFSY |
| | | TFEDVPFHSSYAHSQSLDRLMNPLIDQYLYYLSRTNTPSGTTTQSRLQFSQAGASDIRD |
| | | QSRNWLPGPCYRQQRVSKTSADNNNSEYSWTGATKYHLNGRDSLVNPGPAMASHKDDEE |
| | | KFFPQSGVLIFGKQGSEKTNVDIEKVMITDEEEIRTTNPVATEQYGSVSTNLQRGNRQA |
| | | ATADVNTQGVLPGMVWQDRDVYLQGPIWAKIPHTDGHFHPSPLMGGFGLKHPPPQILIK |
| | | NTPVPANPSTTFSAAKFASFITQYSTGQVSVEIEWELQKENSKRWNPEIQYTSNYNKSV |
| | | NVDFTVDTNGVYSEPRPIGTRYLTRNL |
| AAV2 | 17 | ATGGCTGCCGATGGTTATCTTCCAGATTGGCTCGAGGACACTCTCTCTGAAGGAATAAG |
| (DNA) | | ACAGTGGTGGAAGCTCAAACCTGGCCCACCACCACCAAAGCCCGCAGAGCGGCATAAGG |
| | | ACGACAGCAGGGGTCTTGTGCTTCCTGGGTACAAGTACCTCGGACCCTTCAACGGACTC |
| | | GACAAGGGAGAGCCGGTCAACGAGGCAGACGCCGCGGCCCTCGAGCACGACAAAGCCTA |
| | | CGACCGGCAGCTCGACAGCGGAGACAACCCGTACCTCAAGTACAACCACGCCGACGCGG |
| | | AGTTTCAGGAGCGCCTTAAAGAAGATACGTCTTTTGGGGGCAACCTCGGACGAGCAGTC |
| | | TTCCAGGCGAAAAAGAGGGTTCTTGAACCTCTGGGCCTGGTTGAGGAACCTGTTAAGAC |
| | | GGCTCCGGGAAAAAAGAGGCCGGTAGAGCACTCTCCTGTGGAGCCAGACTCCTCCTCGG |
| | | GAACCGGAAAGGCGGGCCAGCAGCCTGCAAGAAAAAGATTGAATTTTGGTCAGACTGGA |
| | | GACGCAGACTCAGTACCTGACCCCCAGCCTCTCGGACAGCCACCAGCAGCCCCCTCTGG |
| | | TCTGGGAACTAATACGATGGCTACAGGCAGTGGCGCACCAATGGCAGACAATAACGAGG |
| | | GCGCCGACGGAGTGGGTAATTCCTCGGGAAATTGGCATTGCGATTCCACATGGATGGGC |
| | | GACAGAGTCATCACCACCAGCACCCGAACCTGGGCCCTGCCCACCTACAACAACCACCT |
| | | CTACAAACAAATTTCCAGCCAATCAGGAGCCTCGAACGACAATCACTACTTTGGCTACA |
| | | GCACCCCTTGGGGGTATTTTGACTTCAACAGATTCCACTGCCACTTTTCACCACGTGAC |
| | | TGGCAAAGACTCATCAACAACAACTGGGGATTCCGACCCAAGAGACTCAACTTCAAGCT |
| | | CTTTAACATTCAAGTCAAAGAGGTCACGCAGAATGACGGTACGACGACGATTGCCAATA |
| | | ACCTTACCAGCACGGTTCAGGTGTTTACTGACTCGGAGTACCAGCTCCCGTACGTCCTC |
| | | GGCTCGGCGCATCAAGGATGCCTCCCGCCGTTCCCAGCAGACGTCTTCATGGTGCCACA |
| | | GTATGGATACCTCACCCTGAACAACGGGAGTCAGGCAGTAGGACGCTCTTCATTTTACT |
| | | GCCTGGAGTACTTTCCTTCTCAGATGCTGCGTACCGGAAACAACTTTACCTTCAGCTAC |
| | | ACTTTTGAGGACGTTCCTTTCCACAGCAGCTACGCTCACAGCCAGAGTCTGGACCGTCT |
| | | CATGAATCCTCTCATCGACCAGTACCTGTATTACTTGAGCAGAACAAACACTCCAAGTG |
| | | GAACCACCACGCAGTCAAGGCTTCAGTTTTCTCAGGCCGGAGCGAGTGACATTCGGGAC |
| | | CAGTCTAGGAACTGGCTTCCTGGACCCTGTTACCGCCAGCAGCGAGTATCAAAGACATC |
| | | TGCGGATAACAACAACAGTGAATACTCGTGGACTGGAGCTACCAAGTACCACCTCAATG |
| | | GCAGAGACTCTCTGGTGAATCCGGGCCCGGCCATGGCAAGCCACAAGGACGATGAAGAA |
| | | AAGTTTTTTCCTCAGAGCGGGGTTCTCATCTTTGGGAAGCAAGGCTCAGAGAAAACAAA |
| | | TGTGGACATTGAAAAGGTCATGATTACAGACGAAGAGGAAATCAGGACAACCAATCCCG |
| | | TGGCTACGGAGCAGTATGGTTCTGTATCTACCAACCTCCAGAGAGGCAACAGACAAGCA |
| | | GCTACCGCAGATGTCAACACACAAGGCGTTCTTCCAGGCATGGTCTGGCAGGACAGAGA |
| | | TGTGTACCTTCAGGGGCCCATCTGGGCAAAGATTCCACACACGGACGGACATTTTCACC |
| | | CCTCTCCCCTCATGGGTGGATTCGGACTTAAACACCCTCCTCCACAGATTCTCATCAAG |
| | | AACACCCCGGTACCTGCGAATCCTTCGACCACCTTCAGTGCGGCAAAGTTTGCTTCCTT |
| | | CATCACACAGTACTCCACGGGACAGGTCAGCGTGGAGATCGAGTGGGAGCTGCAGAAGG |
| | | AAAACAGCAAACGCTGGAATCCCGAAATTCAGTACACTTCCAACTACAACAAGTCTGTT |
| | | AATGTGGACTTTACTGTGGACACTAATGGCGTGTATTCAGAGCCTCGCCCCATTGGCAC |
| | | CAGATACCTGACTCGTAATCTGTAA |
| AAV1 | 18 | MAADGYLPDWLEDNLSEGIREWWDLKPGAPKPKANQQKQDDGRGLVLPGYKYLGPFNGL |
| (amino acid) | | DKGEPVNAADAAALEHDKAYDQQLKAGDNPYLRYNHADAEFQERLQEDTSFGGNLGRAV |
| | | FQAKKRVLEPLGLVEEGAKTAPGKKRPVEQSPQEPDSSSGIGKTGQQPAKKRLNFGQTG |
| | | DSESVPDPQPLGEPPATPAAVGPTTMASGGGAPMADNNEGADGVGNASGNWHCDSTWLG |
| | | DRVITTSTRTWALPTYNNHLYKQISSASTGASNDNHYFGYSTPWGYFDFNRFHCHFSPR |
| | | DWQRLINNNWGFRPKRLNFKLFNIQVKEVTTNDGVTTIANNLTSTVQVFSDSEYQLPYV |
| | | LGSAHQGCLPPFPADVFMIPQYGYLTLNNGSQAVGRSSFYCLEYFPSQMLRTGNNFTFS |
| | | YTFEEVPFHSSYAHSQSLDRLMNPLIDQYLYYLNRTQNQSGSAQNKDLLFSRGSPAGMS |
| | | VQPKNWLPGPCYRQQRVSKTKTDNNNSNFTWTGASKYNLNGRESIINPGTAMASHKDDE |
| | | DKFFPMSGVMIFGKESAGASNTALDNVMITDEEEIKATNPVATERFGTVAVNFQSSSTD |
| | | PATGDVHAMGALPGMVWQDRDVYLQGPIWAKIPHTDGHFHPSPLMGGFGLKNPPPQILI |
| | | KNTPVPANPPAEFSATKFASFITQYSTGQVSVEIEWELQKENSKRWNPEVQYTSNYAKS |
| | | ANVDFTVDNNGLYTEPRPIGTRYLTRPL |
| AAVI | 19 | atggctgccgatggttatcttccagattggctcgaggacaacctctctgagggcattcg |
| (DNA) | | cgagtggtgggacttgaaacctggagccccgaagcccaaagccaaccagcaaaagcagg |
| | | acgacggccggggtctggtgcttcctggctacaagtacctcggacccttcaacggactc |
| | | gacaagggggagcccgtcaacgcggcggacgcagcggccctcgagcacgacaaggccta |
| | | cgaccagcagctcaaagcgggtgacaatccgtacctgcggtataaccacgccgacgccg |
| | | agtttcaggagcgtctgcaagaagatacgtcttttgggggcaacctcgggcgagcagtc |
| | | ttccaggccaagaagcgggttctcgaacctctcggtctggttgaggaaggcgctaagac |
| | | ggctcctggaaagaaacgtccggtagagcagtcgccacaagagccagactectcctcgg |
| | | gcatcggcaagacaggccagcagcccgctaaaaagagactcaattttggtcagactggc |
| | | gactcagagtcagtccccgatccacaacctctcggagaacctccagcaacccccgctgc |
| | | tgtgggacctactacaatggcttcaggcggtggcgcaccaatggcagacaataacgaag |
| | | gcgccgacggagtgggtaatgcctcaggaaattggcattgcgattccacatggctgggc |
| | | gacagagtcatcaccaccagcacccgcacctgggccttgcccacctacaataaccacct |
| | | ctacaagcaaatctccagtgcttcaacgggggccagcaacgacaaccactacttcggct |
| | | acagcaccccctgggggtattttgatttcaacagattccactgccacttttcaccacgt |
| | | gactggcagcgactcatcaacaacaattggggattccggcccaagagactcaacttcaa |
| | | actcttcaacatccaagtcaaggaggtcacgacgaatgatggcgtcacaaccatcgcta |
| | | ataaccttaccagcacggttcaagtcttctcggactcggagtaccagcttccgtacgtc |
| | | ctcggctctgcgcaccagggctgcctccctccgttcccggcggacgtgttcatgattcc |
| | | gcaatacggctacctgacgctcaacaatggcagccaagccgtgggacgttcatcctttt |
| | | actgcctggaatatttcccttctcagatgctgagaacgggcaacaactttaccttcagc |
| | | tacacctttgaggaagtgcctttccacagcagctacgcgcacagccagagcctggaccg |
| | | gctgatgaatcctctcatcgaccaatacctgtattacctgaacagaactcaaaatcagt |
| | | ccggaagtgcccaaaacaaggacttgctgtttagccgtgggtctccagctggcatgtct |
| | | gttcagcccaaaaactggctacctggaccctgttatcggcagcagcgcgtttctaaaac |
| | | aaaaacagacaacaacaacagcaattttacctggactggtgcttcaaaatataacctca |
| | | atgggcgtgaatccatcatcaaccctggcactgctatggcctcacacaaagacgacgaa |
| | | gacaagttctttcccatgagcggtgtcatgatttttggaaaagagagcgccggagcttc |
| | | aaacactgcattggacaatgtcatgattacagacgaagaggaaattaaagccactaacc |
| | | ctgtggccaccgaaagatttgggaccgtggcagtcaatttccagagcagcagcacagac |
| | | cctgcgaccggagatgtgcatgctatgggagcattacctggcatggtgtggcaagatag |
| | | agacgtgtacctgcagggtcccatttgggccaaaattcctcacacagatggacactttc |
| | | acccgtctcctcttatgggcggctttggactcaagaacccgcctcctcagatcctcatc |
| | | aaaaacacgcctgttcctgcgaatcctccggcggagttttcagctacaaagtttgcttc |
| | | attcatcacccaatactccacaggacaagtgagtgtggaaattgaatgggagctgcaga |
| | | aagaaaacagcaagcgctggaatcccgaagtgcagtacacatccaattatgcaaaatct |
| | | gccaacgttgattttactgtggacaacaatggactttatactgagcctcgccccattgg |
| | | cacccgttaccttacccgtcccctgtaa |
| AAV5 | 20 | MSFVDHPPDWLEEVGEGLREFLGLEAGPPKPKPNQQHQDQARGLVLPGYNYLGPGNGLD |
| (amino acid) | | RGEPVNRADEVAREHDISYNEQLEAGDNPYLKYNHADAEFQEKLADDTSFGGNLGKAVF |
| | | QAKKRVLEPFGLVEEGAKTAPTGKRIDDHFPKRKKARTEEDSKPSTSSDAEAGPSGSQQ |
| | | LQIPAQPASSLGADTMSAGGGGPLGDNNQGADGVGNASGDWHCDSTWMGDRVVTKSTRT |
| | | WVLPSYNNHQYREIKSGSVDGSNANAYFGYSTPWGYFDFNRFHSHWSPRDWQRLINNYW |
| | | GFRPRSLRVKIFNIQVKEVTVQDSTTTIANNLTSTVQVFTDDDYQLPYVVGNGTEGCLP |
| | | AFPPQVFTLPQYGYATLNRDNTENPTERSSFFCLEYFPSKMLRTGNNFEFTYNFEEVPF |
| | | HSSFAPSQNLFKLANPLVDQYLYRFVSTNNTGGVQFNKNLAGRYANTYKNWFPGPMGRT |
| | | QGWNLGSGVNRASVSAFATTNRMELEGASYQVPPQPNGMTNNLQGSNTYALENTMIFNS |
| | | QPANPGTTATYLEGNMLITSESETQPVNRVAYNVGGQMATNNQSSTTAPATGTYNLQEI |
| | | VPGSVWMERDVYLQGPIWAKIPETGAHFHPSPAMGGFGLKHPPPMMLIKNTPVPGNITS |
| | | FSDVPVSSFITQYSTGQVTVEMEWELKKENSKRWNPEIQYTNNYNDPQFVDFAPDSTGE |
| | | YRTTRPIGTRYLTRPL |
| AAV5 | 21 | atgtcttttgttgatcaccctccagattggttggaagaagttggtgaaggtcttcgcga |
| (DNA) | | gtttttgggccttgaagcgggcccaccgaaaccaaaacccaatcagcagcatcaagatc |
| | | aagcccgtggtcttgtgctgcctggttataactatctcggacccggaaacggtctcgat |
| | | cgaggagagcctgtcaacagggcagacgaggtcgcgcgagagcacgacatctcgtacaa |
| | | cgagcagcttgaggcgggagacaacccctacctcaagtacaaccacgcggacgccgagt |
| | | ttcaggagaagctcgccgacgacacatccttcgggggaaacctcggaaaggcagtcttt |
| | | caggccaagaaaagggttctcgaaccttttggcctggttgaagagggtgctaagacggc |
| | | ccctaccggaaagcggatagacgaccactttccaaaaagaaagaaggcccggaccgaag |
| | | aggactccaagccttccacctcgtcagacgccgaagctggacccagcggatcccagcag |
| | | ctgcaaatcccagcccaaccagcctcaagtttgggagctgatacaatgtctgcgggagg |
| | | tggcggcccattgggcgacaataaccaaggtgccgatggagtgggcaatgcctcgggag |
| | | attggcattgcgattccacgtggatgggggacagagtcgtcaccaagtccacccgaacc |
| | | tgggtgctgcccagctacaacaaccaccagtaccgagagatcaaaagcggctccgtcga |
| | | cggaagcaacgccaacgcctactttggatacagcaccccctgggggtactttgacttta |
| | | accgcttccacagccactggagcccccgagactggcaaagactcatcaacaactactgg |
| | | ggcttcagaccccggtccctcagagtcaaaatcttcaacattcaagtcaaagaggtcac |
| | | ggtgcaggactccaccaccaccatcgccaacaacctcacctccaccgtccaagtgttta |
| | | cggacgacgactaccagctgccctacgtcgtcggcaacgggaccgagggatgcctgccg |
| | | gccttccctccgcaggtctttacgctgccgcagtacggttacgcgacgctgaaccgcga |
| | | caacacagaaaatcccaccgagaggagcagcttcttctgcctagagtactttcccagca |
| | | agatgctgagaacgggcaacaactttgagtttacctacaactttgaggaggtgcccttc |
| | | cactccagcttcgctcccagtcagaacctcttcaagctggccaacccgctggtggacca |
| | | gtacttgtaccgcttcgtgagcacaaataacactggcggagtccagttcaacaagaacc |
| | | tggccgggagatacgccaacacctacaaaaactggttcccggggcccatgggccgaacc |
| | | cagggctggaacctgggctccggggtcaaccgcgccagtgtcagcgccttcgccacgac |
| | | caataggatggagctcgagggcgcgagttaccaggtgcccccgcagccgaacggcatga |
| | | ccaacaacctccagggcagcaacacctatgccctggagaacactatgatcttcaacagc |
| | | cagccggcgaacccgggcaccaccgccacgtacctcgagggcaacatgctcatcaccag |
| | | cgagagcgagacgcagccggtgaaccgcgtggcgtacaacgtcggcgggcagatggcca |
| | | ccaacaaccagagctccaccactgccccegcgaccggcacgtacaacctccaggaaatc |
| | | gtgcccggcagcgtgtggatggagagggacgtgtacctccaaggacccatctgggccaa |
| | | gatcccagagacgggggcgcactttcacccctctccggccatgggcggattcggactca |
| | | aacacccaccgcccatgatgctcatcaagaacacgcctgtgcccggaaatatcaccagc |
| | | ttctcggacgtgcccgtcagcagcttcatcacccagtacagcaccgggcaggtcaccgt |
| | | ggagatggagtgggagctcaagaaggaaaactccaagaggtggaacccagagatccagt |
| | | acacaaacaactacaacgacccccagtttgtggactttgccccggacagcaccggggaa |
| | | tacagaaccaccagacctatcggaacccgataccttacccgacccctttaa |
| TTD-001 | 3636 | MAADGYLPDWLEDNLSEGIREWWALKPGAPQPKANQQHQDNARGLVLPGYKYLGPGNGL |
| 9mer peptide | | DKGEPVNAADAAALEHDKAYDQQLKAGDNPYLKYNHADAEFQERLKEDTSFGGNLGRAV |
| underlined, | | FQAKKRLLEPLGLVEEAAKTAPGKKRPVEQSPQEPDSSAGIGKSGAQPAKKRLNFGQTG |
| starts at | | DTESVPDPQPIGEPPAAPSGVGSLTMASGGGAPVADNNEGADGVGSSSGNWHCDSQWLG |
| position 587 | | DRVITTSTRTWALPTYNNHLYKQISNSTSGGSSNDNAYFGYSTPWGYFDFNRFHCHFSP |
| (immediately | | RDWQRLINNNWGFRPKRLNFKLFNIQVKEVTDNNGVKTIANNLTSTVQVFTDSDYQLPY |
| subsequent to | | VLGSAHEGCLPPFPADVFMIPQYGYLTLNDGSQAVGRSSFYCLEYFPSQMLRTGNNFQF |
| position 586); | | SYEFENVPFHSSYAHSQSLDRLMNPLIDQYLYYLSKTINGSGQNQQTLKFSVAGPSNMA |
| 743 aa | | VQGRNYIPGPSYRQQRVSTTVTQNNNSEFAWPGASSWALNGRNSLMNPGPAMASHKEGE |
| | | DRFFPLSGSLIFGKQGTGRDNVDADKVMITNEEEIKTTNPVATESYGQVATNHQSPLNG |
| | | AVHLYAQAQTGWVQNQGILPGMVWQDRDVYLQGPIWAKIPHTDGNFHPSPLMGGFGMKH |
| | | PPPQILIKNTPVPADPPTAFNKDKLNSFITQYSTGQVSVEIEWELQKENSKRWNPEIQY |
| | | TSNYYKSNNVEFAVNTEGVYSEPRPIGTRYLTRNL |
| TTD-001 | 3623 | ATGGCTGCCGATGGTTATCTTCCAGATTGGCTCGAGGACAACCTTAGTGAAGGAATTCG |
| 9mer peptide | | CGAGTGGTGGGCTTTGAAACCTGGAGCCCCTCAACCCAAGGCAAATCAACAACATCAAG |
| underlined | | ACAACGCTCGAGGTCTTGTGCTTCCGGGTTACAAATACCTTGGACCCGGCAACGGACTC |
| | | GACAAGGGGGAGCCGGTCAACGCAGCAGACGCGGCGGCCCTCGAGCACGACAAGGCCTA |
| | | CGACCAGCAGCTCAAGGCCGGAGACAACCCGTACCTCAAGTACAACCACGCCGACGCCG |
| | | AGTTCCAGGAGCGGCTCAAAGAAGATACGTCTTTTGGGGGCAACCTCGGGCGAGCAGTC |
| | | TTCCAGGCCAAAAAGAGGCTTCTTGAACCTCTTGGTCTGGTTGAGGAAGCGGCTAAGAC |
| | | GGCTCCTGGAAAGAAGAGGCCTGTAGAGCAGTCTCCTCAGGAACCGGACTCCTCCGCGG |
| | | GTATTGGCAAATCGGGTGCACAGCCCGCTAAAAAGAGACTCAATTTCGGTCAGACTGGC |
| | | GACACAGAGTCAGTCCCAGACCCTCAACCAATCGGAGAACCTCCCGCAGCCCCCTCAGG |
| | | TGTGGGATCTCTTACAATGGCTTCAGGTGGTGGCGCACCAGTGGCAGACAATAACGAAG |
| | | GTGCCGATGGAGTGGGTAGTTCCTCGGGAAATTGGCATTGCGATTCCCAATGGCTGGGG |
| | | GACAGAGTCATCACCACCAGCACCCGAACCTGGGCCCTGCCCACCTACAACAATCACCT |
| | | CTACAAGCAAATCTCCAACAGCACATCTGGAGGATCTTCAAATGACAACGCCTACTTCG |
| | | GCTACAGCACCCCCTGGGGGTATTTTGACTTCAACAGATTCCACTGCCACTTCTCACCA |
| | | CGTGACTGGCAGCGACTCATCAACAACAACTGGGGATTCCGGCCTAAGCGACTCAACTT |
| | | CAAGCTCTTCAACATTCAGGTCAAAGAGGTTACGGACAACAATGGAGTCAAGACCATCG |
| | | CCAATAACCTTACCAGCACGGTCCAGGTCTTCACGGACTCAGACTATCAGCTCCCGTAC |
| | | GTGCTCGGGTCGGCTCACGAGGGCTGCCTCCCGCCGTTCCCAGCGGACGTTTTCATGAT |
| | | TCCTCAGTACGGGTATCTGACGCTTAATGATGGAAGCCAGGCCGTGGGTCGTTCGTCCT |
| | | TTTACTGCCTGGAATATTTCCCGTCGCAAATGCTAAGAACGGGTAACAACTTCCAGTTC |
| | | AGCTACGAGTTTGAGAACGTACCTTTCCATAGCAGCTACGCTCACAGCCAAAGCCTGGA |
| | | CCGACTAATGAATCCACTCATCGACCAATACTTGTACTATCTCTCAAAGACTATTAACG |
| | | GTTCTGGACAGAATCAACAAACGCTAAAATTCAGTGTGGCCGGACCCAGCAACATGGCT |
| | | GTCCAGGGAAGAAACTACATACCTGGACCCAGCTACCGACAACAACGTGTCTCAACCAC |
| | | TGTGACTCAAAACAACAACAGCGAATTTGCTTGGCCTGGAGCTTCTTCTTGGGCTCTCA |
| | | ATGGACGTAATAGCTTGATGAATCCTGGACCTGCTATGGCCAGCCACAAAGAAGGAGAG |
| | | GACCGTTTCTTTCCTTTGTCTGGATCTTTAATTTTTGGCAAACAAGGAACTGGAAGAGA |
| | | CAACGTGGATGCGGACAAAGTCATGATAACCAACGAAGAAGAAATTAAAACTACTAACC |
| | | CGGTAGCAACGGAGTCCTATGGACAAGTGGCCACAAACCACCAGAGTCCGCTTAATGGT |
| | | GCCGTCCATCTTTATGCTCAGGCGCAGACCGGCTGGGTTCAAAACCAAGGAATACTTCC |
| | | GGGTATGGTTTGGCAGGACAGAGATGTGTACCTGCAAGGACCCATTTGGGCCAAAATTC |
| | | CTCACACGGACGGCAACTTTCACCCTTCTCCGCTGATGGGAGGGTTTGGAATGAAGCAC |
| | | CCGCCTCCTCAGATCCTCATCAAAAACACACCTGTACCTGCCGATCCTCCAACGGCCTT |
| | | CAACAAGGACAAGCTGAACTCTTTCATCACCCAGTATTCTACTGGCCAAGTCAGCGTGG |
| | | AGATCGAGTGGGAGCTGCAGAAGGAAAACAGCAAGCGGTGGAACCCGGAGATCCAGTAC |
| | | ACTTCCAACTATTACAAGTCTAATAATGTTGAATTTGCTGTTAATACTGAAGGTGTATA |
| | | TAGTGAACCCCGCCCCATTGGCACCAGATACCTGACTCGTAATCTGTAA |
| VOY9P39 | 5147 | MAADGYLPDWLEDNLSEGIREWWALKPGAPQPKANQQHQDNARGLVLPGYKYLGPGNGL |
| (amino acid) | | DKGEPVNAADAAALEHDKAYDQQLKAGDNPYLKYNHADAEFQERLKEDTSFGGNLGRAV |
| | | FQAKKRLLEPLGLVEEAAKTAPGKKRPVEQSPQEPDSSAGIGKSGAQPAKKRLNFGQTG |
| | | DTESVPDPQPIGEPPAAPSGVGSLTMASGGGAPVADNNEGADGVGSSSGNWHCDSQWLG |
| | | DRVITTSTRTWALPTYNNHLYKQISNSTSGGSSNDNAYFGYSTPWGYFDFNRFHCHFSP |
| | | RDWQRLINNNWGFRPKRLNFKLFNIQVKEVTDNNGVKTIANNLTSTVQVFTDSDYQLPY |
| | | VLGSAHEGCLPPFPADVFMIPQYGYLTLNDGSQAVGRSSFYCLEYFPSQMLRTGNNFQF |
| | | SYEFENVPFHSSYAHSQSLDRLMNPLIDQYLYYLSKTINGSGQNQQTLKFSVAGPSNMA |
| | | VQGRNYIPGPSYRQQRVSTTVTQNNNSEFAWPGASSWALNGRNSLMNPGPAMASHKEGE |
| | | DRFFPLSGSLIFGKQGTGRDNVDADKVMITNEEEIKTTNPVATESYGQVATNHQSDGTG |
| | | STTGWAQAQTGWVQNQGILPGMVWQDRDVYLQGPIWAKIPHTDGNFHPSPLMGGFGMKH |
| | | PPPQILIKNTPVPADPPTAFNKDKLNSFITQYSTGQVSVEIEWELQKENSKRWNPEIQY |
| | | TSNYYKSNNVEFAVNTEGVYSEPRPIGTRYLTRNL |
| VOY9P39 | 5148 | ATGGCTGCCGATGGTTATCTTCCAGATTGGCTCGAGGACAACCTTAGTGAAGGAATTCG |
| (DNA) | | CGAGTGGTGGGCTTTGAAACCTGGAGCCCCTCAACCCAAGGCAAATCAACAACATCAAG |
| | | ACAACGCTCGAGGTCTTGTGCTTCCGGGTTACAAATACCTTGGACCCGGCAACGGACTC |
| | | GACAAGGGGGAGCCGGTCAACGCAGCAGACGCGGCGGCCCTCGAGCACGACAAGGCCTA |
| | | CGACCAGCAGCTCAAGGCCGGAGACAACCCGTACCTCAAGTACAACCACGCCGACGCCG |
| | | AGTTCCAGGAGCGGCTCAAAGAAGATACGTCTTTTGGGGGCAACCTCGGGCGAGCAGTC |
| | | TTCCAGGCCAAAAAGAGGCTTCTTGAACCTCTTGGTCTGGTTGAGGAAGCGGCTAAGAC |
| | | GGCTCCTGGAAAGAAGAGGCCTGTAGAGCAGTCTCCTCAGGAACCGGACTCCTCCGCGG |
| | | GTATTGGCAAATCGGGTGCACAGCCCGCTAAAAAGAGACTCAATTTCGGTCAGACTGGC |
| | | GACACAGAGTCAGTCCCAGACCCTCAACCAATCGGAGAACCTCCCGCAGCCCCCTCAGG |
| | | TGTGGGATCTCTTACAATGGCTTCAGGTGGTGGCGCACCAGTGGCAGACAATAACGAAG |
| | | GTGCCGATGGAGTGGGTAGTTCCTCGGGAAATTGGCATTGCGATTCCCAATGGCTGGGG |
| | | GACAGAGTCATCACCACCAGCACCCGAACCTGGGCCCTGCCCACCTACAACAATCACCT |
| | | CTACAAGCAAATCTCCAACAGCACATCTGGAGGATCTTCAAATGACAACGCCTACTTCG |
| | | GCTACAGCACCCCCTGGGGGTATTTTGACTTCAACAGATTCCACTGCCACTTCTCACCA |
| | | CGTGACTGGCAGCGACTCATCAACAACAACTGGGGATTCCGGCCTAAGCGACTCAACTT |
| | | CAAGCTCTTCAACATTCAGGTCAAAGAGGTTACGGACAACAATGGAGTCAAGACCATCG |
| | | CCAATAACCTTACCAGCACGGTCCAGGTCTTCACGGACTCAGACTATCAGCTCCCGTAC |
| | | GTGCTCGGGTCGGCTCACGAGGGCTGCCTCCCGCCGTTCCCAGCGGACGTTTTCATGAT |
| | | TCCTCAGTACGGGTATCTGACGCTTAATGATGGAAGCCAGGCCGTGGGTCGTTCGTCCT |
| | | TTTACTGCCTGGAATATTTCCCGTCGCAAATGCTAAGAACGGGTAACAACTTCCAGTTC |
| | | AGCTACGAGTTTGAGAACGTACCTTTCCATAGCAGCTACGCTCACAGCCAAAGCCTGGA |
| | | CCGACTAATGAATCCACTCATCGACCAATACTTGTACTATCTCTCAAAGACTATTAACG |
| | | GTTCTGGACAGAATCAACAAACGCTAAAATTCAGTGTGGCCGGACCCAGCAACATGGCT |
| | | GTCCAGGGAAGAAACTACATACCTGGACCCAGCTACCGACAACAACGTGTCTCAACCAC |
| | | TGTGACTCAAAACAACAACAGCGAATTTGCTTGGCCTGGAGCTTCTTCTTGGGCTCTCA |
| | | ATGGACGTAATAGCTTGATGAATCCTGGACCTGCTATGGCCAGCCACAAAGAAGGAGAG |
| | | GACCGTTTCTTTCCTTTGTCTGGATCTTTAATTTTTGGCAAACAAGGAACTGGAAGAGA |
| | | CAACGTGGATGCGGACAAAGTCATGATAACCAACGAAGAAGAAATTAAAACTACTAACC |
| | | CGGTAGCAACGGAGTCCTATGGACAAGTGGCCACAAACCACCAGAGTGACGGAACAGGA |
| | | AGCACAACAGGATGGGCACAGGCGCAGACCGGCTGGGTTCAAAACCAAGGAATACTTCC |
| | | GGGTATGGTTTGGCAGGACAGAGATGTGTACCTGCAAGGACCCATTTGGGCCAAAATTC |
| | | CTCACACGGACGGCAACTTTCACCCTTCTCCGCTGATGGGAGGGTTTGGAATGAAGCAC |
| | | CCGCCTCCTCAGATCCTCATCAAAAACACACCTGTACCTGCCGATCCTCCAACGGCCTT |
| | | CAACAAGGACAAGCTGAACTCTTTCATCACCCAGTATTCTACTGGCCAAGTCAGCGTGG |
| | | AGATCGAGTGGGAGCTGCAGAAGGAAAACAGCAAGCGGTGGAACCCGGAGATCCAGTAC |
| | | ACTTCCAACTATTACAAGTCTAATAATGTTGAATTTGCTGTTAATACTGAAGGTGTATA |
| | | TAGTGAACCCCGCCCCATTGGCACCAGATACCTGACTCGTAATCTGTAA |

[0528] In some embodiments, the AAV capsid polypeptide, e.g., the AAV capsid variant, comprises the amino acid sequence of any of SEQ ID NOs: 1, 3, 11, 138, 12, 13, 14, 16, 18, 20, 5147, 3636, or an amino acid sequence substantially identical (e.g., having at least 70%, 75%, 80%, 85%, 90%, 92%, 95%, 97%, 98%, or 99% sequence identity) thereto. In some embodiments the AAV capsid polypeptide, e.g., the AAV capsid variant, comprises an amino acid sequence comprising at least one, two, or three modifications, e.g., substitutions (e.g., conservative substitutions), insertions, or deletions, but no more than 30, 20, or 10 modifications, e.g., substitutions (e.g., conservative substitutions), insertions, or deletions, relative to the amino acid sequence of any of SEQ ID NOs: 1, 3, 11, 138, 12, 13, 14, 16, 18, 20, or 3636. In some embodiments, the AAV capsid polypeptide, e.g., the AAV capsid variant, comprises an amino acid sequence encoded by the nucleotide sequence of any of SEQ ID NOs: 137, 15, 17, 19, 21, 3623, or a nucleotide sequence substantially identical (e.g., having at least 70%, 75%, 80%, 85%, 90%, 92%, 95%, 97%, 98%, or 99% sequence identity) thereto.

[0529] In some embodiments, the nucleotide sequence encoding the AAV capsid polypeptide, e.g., the AAV capsid variant, comprises the nucleotide sequence of any of SEQ ID NOs: 137, 15, 17, 19, 21, 5148, or 3623, or a nucleotide sequence substantially identical (e.g., having at least 70%, 75%, 80%, 85%, 90%, 92%, 95%, 97%, 98%, or 99% sequence identity) thereto. In some embodiments, the nucleotide sequence encoding the AAV capsid polypeptide, e.g., the AAV capsid variant, comprises a nucleotide sequence comprising at least one, two, or three modifications, e.g., substitutions (e.g., conservative substitutions), insertions, or deletions, but no more than 30, 20, or 10 modifications, e.g., substitutions (e.g., conservative substitutions), insertions, or deletions, relative to the nucleotide sequence of any of SEQ ID NOs: 137, 15, 17, 19, 21, or 3623.

[0530] In some embodiments, the AAV capsid polypeptide, e.g., the AAV capsid variant, comprises the amino acid sequence of SEQ ID NO: 138 or an amino acid sequence substantially identical (e.g., having at least 70%, 75%, 80%, 85%, 90%, 92%, 95%, 97%, 98%, or 99% sequence identity) thereto. In some embodiments the AAV capsid polypeptide, e.g., the AAV capsid variant, comprises an amino acid sequence comprising at least one, two, or three modifications, e.g., substitutions (e.g., conservative substitutions), but no more than 30, 20, or 10 modifications, e.g., substitutions (e.g., conservative substitutions), relative to the amino acid sequence of SEQ ID NO: 138. In some embodiments, the AAV capsid polypeptide, e.g., the AAV capsid variant, comprises an amino acid sequence encoded by the nucleotide sequence of SEQ ID NO: 137 or a nucleotide sequence substantially identical (e.g., having at least 70%, 75%, 80%, 85%, 90%, 92%, 95%, 97%, 98%, or 99% sequence identity) thereto. In some embodiments, the nucleotide sequence encoding the AAV capsid polypeptide, e.g., the AAV capsid variant, comprises the nucleotide sequence of SEQ ID NO: 137 or a nucleotide sequence substantially identical (e.g., having at least 70%, 75%, 80%, 85%, 90%, 92%, 95%, 97%, 98%, or 99% sequence identity) thereto. In some embodiments, the AAV capsid polypeptide, e.g., the AAV capsid variant, comprises substitution at position K449, e.g., a K449R substitution, numbered according to SEQ ID NO: 138.

[0531] In some embodiments, the AAV capsid polypeptide, e.g., the AAV capsid variant, comprises the amino acid sequence of SEQ ID NO: 11 or an amino acid sequence substantially identical (e.g., having at least 70%, 75%, 80%, 85%, 90%, 92%, 95%, 97%, 98%, or 99% sequence identity) thereto. In some embodiments the AAV capsid polypeptide, e.g., the AAV capsid variant, comprises an amino acid sequence comprising at least one, two, or three modifications, e.g., substitutions (e.g., conservative substitutions), but no more than 30, 20, or 10 modifications, e.g., substitutions (conservative substitutions), relative to the amino acid sequence of SEQ ID NO: 11, optionally wherein position 449 is not R.

[0532] In some embodiments, the capsid polypeptide, comprises the amino acid sequence of SEQ ID NO: 1 or an amino acid sequence substantially identical (e.g., having at least 70%, 75%, 80%, 85%, 90%, 92%, 95%, 97%, 98%, or 99% sequence identity) thereto. In some embodiments the AAV capsid polypeptide, e.g., the AAV capsid variant, comprises an amino acid sequence comprising at least one, two, or three modifications, e.g., substitutions (e.g., conservative substitutions), but no more than 30, 20, or 10 modifications, e.g., substitutions (e.g., conservative substitutions), relative to the amino acid sequence of SEQ ID NO: 1.

[0533] In some embodiments, the capsid polypeptide, comprises the amino acid sequence of SEQ ID NO: 3 or an amino acid sequence substantially identical (e.g., having at least 70%, 75%, 80%, 85%, 90%, 92%, 95%, 97%, 98%, or 99% sequence identity) thereto. In some embodiments the AAV capsid polypeptide, e.g., the AAV capsid variant, comprises an amino acid sequence comprising at least one, two, or three modifications, e.g., substitutions (e.g., conservative substitutions), but no more than 30, 20, or 10 modifications, e.g., substitutions (e.g., conservative substitutions), relative to the amino acid sequence of SEQ ID NO: 3.

[0534] In some embodiments, the capsid polypeptide, comprises the amino acid sequence of SEQ ID NO: 5147 or an amino acid sequence substantially identical (e.g., having at least 70%, 75%, 80%, 85%, 90%, 92%, 95%, 97%, 98%, or 99% sequence identity) thereto. In some embodiments the AAV capsid polypeptide, e.g., the AAV capsid variant, comprises an amino acid sequence comprising at least one, two, or three modifications, e.g., substitutions (e.g., conservative substitutions), but no more than 30, 20, or 10 modifications, e.g., substitutions (e.g., conservative substitutions), relative to the amino acid sequence of SEQ ID NO: 5147.

[0535] In some embodiments, an AAV capsid variant disclosed herein comprises a modification in loop VIII of AAV9, e.g., at positions between 580-599, e.g., at positions 587, 588, 589, and/or 590, numbered relative to SEQ ID NO: 5, 8, 138 or 3636-3647. In some embodiments, loop (e.g., loop VIII) is used interchangeably herein with the term variable region (e.g., variable region VIII), or VR (e.g., VR-VIII). In some embodiments loop VIII comprises positions 580-599 (e.g., amino acids VATNHQSAQAQAQTGWVQNQ (SEQ ID NO: 1195)), numbered according to SEQ ID NO: 138. In some embodiments, loop VIII comprises positions 582-593 (e.g., amino acids TNHQSAQAQAQT (SEQ ID NO: 1196)), numbered according to SEQ ID NO: 138. In some embodiments loop VIII comprises positions 587-593 (e.g., amino acids AQAQAQT (SEQ ID NO: 1197)), numbered according to SEQ ID NO: 138. In some embodiments loop VIII comprises positions 587-590 (e.g., amino acids AQAQ (SEQ ID NO: 5026)), numbered according to SEQ ID NO: 138. In some embodiments, loop VIII or variable region VIII (VR-VIII) is as described in DiMattia et al. “Structural Insights into the Unique Properties of the Adeno-Associated Virus Serotype 9,” Journal of Virology, 12(86):6947-6958 (the contents of which are hereby incorporated by reference in their entirety), e.g., comprising positions 581-593 (e.g., ATNHQSAQAQAQT (SEQ ID NO: 1198)), numbered according to SEQ ID NO: 138.

[0536] In some embodiments, the AAV capsid polypeptide, e.g., the AAV capsid variant, comprises a peptide comprising the amino acid sequence of TLAVPFK (SEQ ID NO: 1262). In some embodiments, the peptide is present immediately subsequent to position 588, relative to a reference sequence numbered according to SEQ ID NO: 138. In some embodiments, the capsid polypeptide comprises the amino acid substitutions of A587D and Q588G, numbered according to SEQ ID NO: 138.

[0537] In some embodiments, the AAV capsid polypeptide, e.g., the AAV capsid variant, comprises the amino acid substitution of K449R, numbered according to SEQ ID NO: 138; and a peptide comprising the amino acid sequence of TLAVPFK (SEQ ID NO: 1262), wherein the peptide is present immediately subsequent to position 588, relative to a reference sequence numbered according to SEQ ID NO: 138.

[0538] In some embodiments, the AAV capsid polypeptide, e.g., the AAV capsid variant, comprises the amino acid substitution of K449R, numbered according to SEQ ID NO: 138; an peptide comprising the amino acid sequence of TLAVPFK (SEQ ID NO: 1262), wherein the insert is present immediately subsequent to position 588, relative to a reference sequence numbered according to SEQ ID NO: 138; and the amino acid substitutions of A587D and Q588G, numbered according to SEQ ID NO: 138.

[0539] In some embodiments, the AAV capsid polypeptide, e.g., the AAV capsid variant, comprises a peptide comprising the amino acid sequence of TLAVPFK (SEQ ID NO: 1262), wherein the insert is present immediately subsequent to position 588, relative to a reference sequence numbered according to SEQ ID NO: 138; and the amino acid substitutions of A587D and Q588G, numbered according to SEQ ID NO: 138.

[0540] In some embodiments, the AAV capsid polypeptide, e.g., the AAV capsid variant, comprises at least 3, 4, 5, 6, 7, 8, or 9 consecutive amino acids from the amino acid sequence of PLNGAVHLY (SEQ ID NO: 3648). In some embodiments, the AAV capsid polypeptide, e.g., the AAV capsid variant, comprises the amino acid sequence of PLNGAVHLY (SEQ ID NO: 3648), an amino acid sequence comprising at least one, two, or three but no more than four modifications, e.g., substitutions (e.g., conservative substitutions), insertions, or deletions, relative to the amino acid sequence of PLNGAVHLY (SEQ ID NO: 3648), or an amino acid sequence comprising at least one, two, or three but no more than four different amino acids relative to the amino acid sequence of PLNGAVHLY (SEQ ID NO: 3648), optionally wherein position 7 is H. In some embodiments, the amino acid sequence is present in loop VIII. In some embodiments, the amino acid sequence is present immediately subsequent to position 586, relative to a reference sequence numbered according to the amino acid sequence of SEQ ID NO: 138. In some embodiments, the amino acid sequence replaces positions replaces positions 587 and 588 (e.g., A587 and Q 588), numbered according to SEQ ID NO: 138. In some embodiments, the amino acid sequence is present at immediately subsequent to position 586 and replaces positions 587 and 588 (e.g., A587 and Q 588), numbered according to SEQ ID NO: 138.

[0541] In some embodiments, the 3 consecutive amino acids comprise PLN. In some embodiments, the 4 consecutive amino acids comprise PLNG (SEQ ID NO: 3678). In some embodiments, the 5 consecutive amino acids comprise PLNGA (SEQ ID NO: 3679). In some embodiments, the 6 consecutive amino acids comprise PLNGAV (SEQ ID NO: 3680). In some embodiments, the 7 consecutive amino acids comprise PLNGAVH (SEQ ID NO: 3681). In some embodiments, the 8 consecutive amino acids comprise PLNGAVHL (SEQ ID NO: 3682). In some embodiments, the 9 consecutive amino acids comprise PLNGAVHLY (SEQ ID NO: 3648).

[0542] In some embodiments, the four consecutive amino acids comprise NGAV (SEQ ID NO: 3683). In some embodiments, the four consecutive amino acids comprise GAVH (SEQ ID NO: 3684). In some embodiments, the five consecutive amino acids comprise NGAVH (SEQ ID NO: 3685). In some embodiments, the five consecutive amino acids comprise GAVHL (SEQ ID NO: 3686). In some embodiments, the five consecutive amino acids comprise AVHLY (SEQ ID NO: 3687). In some embodiments, the six consecutive amino acids comprise NGAVHL (SEQ ID NO: 3688). In some embodiments, the seven consecutive amino acids comprise NGAVHLY (SEQ ID NO: 3689).

[0543] In some embodiments, the AAV capsid polypeptide, e.g., the AAV capsid variant (e.g., an AAV capsid variant described herein), comprises an amino acid sequence encoded by the nucleotide sequence of CCGCTTAATGGTGCCGTCCATCTTTAT (SEQ ID NO: 3660), or a nucleotide sequence substantially identical (e.g., having at least 70%, 75%, 80%, 85%, 90%, 92%, 95%, 97%, 98%, or 99% sequence identity) thereto. In some embodiments, the AAV capsid, e.g., an AAV capsid variant described herein, comprises an amino acid sequence encoded by a nucleotide sequence comprising at least one, two, three, four, five, six, or seven modifications, e.g., substitutions (e.g., conservative substitutions), insertions, or deletions, but no more than ten modifications, e.g., substitutions (e.g., conservative substitutions), insertions, or deletions, relative to the nucleotide sequence of CCGCTTAATGGTGCCGTCCATCTTTAT (SEQ ID NO: 3660). In some embodiments, the AAV capsid polypeptide, e.g., the AAV capsid variant (e.g., an AAV capsid variant described herein), comprises an amino acid sequence encoded by a nucleotide sequence comprising at least one, two, three, four, five, six, or seven, but no more than ten different nucleotides relative to the nucleotide sequence of CCGCTTAATGGTGCCGTCCATCTTTAT (SEQ ID NO: 3660).

[0544] In some embodiments, the AAV capsid polypeptide, e.g., the AAV capsid variant, comprises the amino acid P at position 587, the amino acid L at position 588, and the amino acid sequence NGAVHLY (SEQ ID NO: 3689), which is present immediately subsequent to position 588, corresponding to or numbered according to SEQ ID NO: 3636.

[0545] In some embodiments, the AAV capsid polypeptide, e.g., the AAV capsid variant, e.g., an AAV capsid variant described herein, comprises the amino acid sequence of SEQ ID NO: 3636, or an amino acid sequence with at least 80% (e.g., at least about 85, 90, 95, 96, 97, 98, or 99%) sequence identity thereto. In some embodiments, the AAV capsid polypeptide, e.g., the AAV capsid variant, e.g., an AAV capsid variant described herein, comprises the amino acid sequence of SEQ ID NO: 3636, or an amino acid sequence at least 95% identical thereto. In some embodiments, the AAV capsid polypeptide, e.g., the AAV capsid variant, e.g., an AAV capsid variant described herein, comprises the amino acid sequence of SEQ ID NO: 3636, or an amino acid sequence at least 99% identical thereto.

[0546] In some embodiments, the AAV capsid polypeptide, e.g., the AAV capsid variant, e.g., an AAV capsid variant described herein, comprises an amino acid sequence comprising at least one, two, or three modifications, substitutions (e.g., conservative substitutions), insertions, or deletions, but not more than 30, 20 or 10 modifications, substitutions (e.g., conservative substitutions), insertions, or deletions relative to the amino acid sequence of SEQ ID NO: 3636. In some embodiments, the AAV capsid polypeptide, e.g., the AAV capsid variant, e.g., an AAV capsid variant described herein, comprises an amino acid sequence having at least one, two, or three but no more than 30, 20, or 10 different amino acids relative to the amino acid sequence of SEQ ID NO: 3636.

[0547] In some embodiments, the AAV capsid polypeptide, e.g., the AAV capsid variant, comprises the amino acid sequence corresponding to positions 138-743, e.g., a VP2, of SEQ ID NO: 3636, or a sequence with at least 80% (e.g., at least about 85, 90, 95, 96, 97, 98, or 99%) sequence identity thereto. In some embodiments, the AAV capsid variant comprises the amino acid sequence corresponding to positions 203-743, e.g., a VP3, of SEQ ID NO: 3636, or a sequence with at least 80% (e.g., at least about 85, 90, 95, 96, 97, 98, or 99%) sequence identity thereto. In some embodiments, the AAV capsid polypeptide, e.g., the AAV capsid variant, comprises the amino acid sequence corresponding to positions 138-736, e.g., a VP2, of SEQ ID NO: 138, or a sequence with at least 80% (e.g., at least about 85, 90, 95, 96, 97, 98, or 99%) sequence identity thereto. In some embodiments, the AAV capsid variant comprises the amino acid sequence corresponding to positions 203-736, e.g., a VP3, of SEQ ID NO: 138, or a sequence with at least 80% (e.g., at least about 85, 90, 95, 96, 97, 98, or 99%) sequence identity thereto. In some embodiments, the amino acid sequence is present immediately subsequent to position 586, numbered according to any one of SEQ ID NO: 138 or 3636, optionally wherein the amino acid replaces positions 587 and 588 (e.g., A587 and Q588), numbered according to SEQ ID NO: 138. In some embodiments, the amino acid sequence corresponds to positions 587-595 of SEQ ID NO: 3636.

[0548] In some embodiments, the AAV capsid polypeptide, e.g., the AAV capsid variant, comprises one or two, but no more than three different amino acids (e.g., substitutions, e.g., conservative substitutions) relative to the amino acid sequence of PLNGAVHLY (SEQ ID NO: 3648), wherein the AAV capsid variant comprises (a) a VP1 protein comprising the amino acid sequence of SEQ ID NO: 138 or 3636; (b) a VP2 protein comprising the amino acid sequence of positions 138-736 of SEQ ID NO: 138 or positions 138-743 of SEQ ID NO: 5, 8, or 3636; (c) a VP3 protein comprising the amino acid sequence of positions 203-736 of SEQ ID NO: 138 or positions 203-743 of SEQ ID NO: 5, 8, or 3636; or (d) an amino acid sequence with at least 90% (e.g., at least about 95, 96, 97, 98, or 99%) sequence identity to any of the amino acid sequences in (a)-(c). In some embodiments, the amino acid sequence is present immediately subsequent to position 586, numbered according to any one of SEQ ID NO: 138 or 3636, optionally wherein the amino acid replaces positions 587 and 588 (e.g., A587 and Q588), numbered according to SEQ ID NO: 138. In some embodiments, the amino acid sequence corresponds to positions 587-595 of SEQ ID NO: 3636.

[0549] In some embodiments, the AAV capsid polypeptide, e.g., the AAV capsid variant, comprises one or two, but no more than three different amino acids (e.g., substitutions, e.g., conservative substitutions) relative to the amino acid sequence of PLNGAVHLY (SEQ ID NO: 3648), wherein the AAV capsid variant comprises the amino acid sequence of any one of SEQ ID NOs: 5, 8, 138, or 3636 or an amino acid sequence with at least 90% (e.g., at least about 95, 96, 97, 98, or 99%) sequence identity to SEQ ID NO: 3636. In some embodiments, the amino acid sequence is present immediately subsequent to position 586, numbered according to any one of SEQ ID NO: 138 or 3636, optionally wherein the amino acid replaces positions 587 and 588 (e.g., A587 and Q588), numbered according to SEQ ID NO: 138. In some embodiments, the amino acid sequence corresponds to positions 587-595 of SEQ ID NO: 3636.

[0550] In some embodiments, the AAV capsid polypeptide, e.g., the AAV capsid variant, comprises an amino acid sequence comprising at least 5, 6, 7, 8, or 9 consecutive amino acids from the amino acid sequence of PLNGAVHLY (SEQ ID NO: 3648), wherein: (i) the 5 consecutive amino acids comprise PLNGA (SEQ ID NO: 3679); (ii) the 6 consecutive amino acids comprise PLNGAV (SEQ ID NO: 3680); (iii) the 7 consecutive amino acids comprise PLNGAVH (SEQ ID NO: 3681); (iv) the 8 consecutive amino acids comprise PLNGAVHL (SEQ ID NO: 3682); or (v) the 9 consecutive amino acids comprise PLNGAVHLY (SEQ ID NO: 3648), wherein the AAV capsid variant comprises: (a) a VP1 protein comprising the amino acid sequence of SEQ ID NO: 138 or SEQ ID NO: 3636; (b) a VP2 protein comprising the amino acid sequence of positions 138-736 of SEQ ID NO: 138 or positions 138-743 of SEQ ID NO: 3636; (c) a VP3 protein comprising the amino acid sequence of positions 203-736 of SEQ ID NO: 138 or positions 203-743 of SEQ ID NO: 3636; or (d) an amino acid sequence with at least 90% (e.g., at least about 95, 96, 97, 98, or 99%) sequence identity to any of the amino acid sequences in (a)-(c). In some embodiments, the amino acid sequence is present immediately subsequent to position 586, numbered according to any one of SEQ ID NO: 138 or 3636, optionally wherein the amino acid replaces positions 587 and 588 (e.g., A587 and Q588), numbered according to SEQ ID NO: 138. In some embodiments, the amino acid sequence corresponds to positions 587-595 of SEQ ID NO: 3636.

[0551] In some embodiments, the AAV capsid polypeptide, e.g., the AAV capsid variant, comprises an amino acid sequence comprising at least 5, 6, 7, 8, or 9 consecutive amino acids from the amino acid sequence of PLNGAVHLY (SEQ ID NO: 3648), wherein: (i) the 5 consecutive amino acids comprise PLNGA (SEQ ID NO: 3679); (ii) the 6 consecutive amino acids comprise PLNGAV (SEQ ID NO: 3680); (iii) the 7 consecutive amino acids comprise PLNGAVH (SEQ ID NO: 3681); (iv) the 8 consecutive amino acids comprise PLNGAVHL (SEQ ID NO: 3682); or (v) the 9 consecutive amino acids comprise PLNGAVHLY (SEQ ID NO: 3648), wherein the AAV capsid variant comprises the amino acid sequence of any one of SEQ ID NOs: 5, 8, or 3636 or an amino acid sequence with at least 90% (e.g., at least about 95, 96, 97, 98, or 99%) sequence identity to any one of SEQ ID NO: 3636. In some embodiments, the amino acid sequence is present immediately subsequent to position 586, numbered according to any one of SEQ ID NO: 138 or 3636, optionally wherein the amino acid replaces positions 587 and 588 (e.g., A587 and Q588), numbered according to SEQ ID NO: 138. In some embodiments, the amino acid sequence corresponds to positions 587-595 of SEQ ID NO: 3636.

[0552] In some embodiments, the nucleotide sequence encoding an AAV capsid polypeptide, e.g., an AAV capsid variant, described herein comprises the nucleotide sequence of SEQ ID NO: 3623, or a nucleotide sequence with at least 80% (e.g., at least about 85, 90, 95, 96, 97, 98, or 99%) sequence identity thereto. In some embodiments, nucleotide sequence encoding the AAV capsid variant comprises a nucleotide sequence comprising at least one, two or three modifications, e.g., substitutions, insertions, or deletions, but not more than 30, 20 or 10 modifications, e.g., substitutions, insertions, or deletions, relative to the nucleotide sequence of SEQ ID NO: 3623. In some embodiments, the nucleotide sequence encoding the AAV capsid variant comprises a nucleotide sequence comprising at least one, two or three, but not more than 30, 20 or 10 different nucleotides, relative to the nucleotide sequence of SEQ ID NO: 3623. In some embodiments, the nucleic acid sequence encoding an AAV capsid polypeptide, e.g., an AAV capsid variant, described herein is codon optimized.

[0553] In some embodiments, an AAV capsid polypeptide, e.g., an AAV capsid variant, described herein has an increased tropism for a CNS cell or tissue, e.g., a brain cell, brain tissue, spinal cord cell, or spinal cord tissue, relative to the tropism of a reference sequence comprising the amino acid sequence of SEQ ID NO: 138.

[0554] In some embodiments, an AAV capsid polypeptide, e.g., an AAV capsid variant, of the present disclosure has decreased tropism for the liver. In some embodiments, an AAV capsid variant comprises a modification, e.g., substitution (e.g., conservative substitution), insertion, or deletion, that results in reduced tropism (e.g., de-targeting) and/or activity in the liver. In some embodiments, the reduced tropism in the liver is compared to an otherwise similar capsid that does not comprise the modification, e.g., a wild-type capsid polypeptide. In some embodiments, an AAV capsid variant described comprises a modification, e.g., substitution (e.g., conservative substitution), insertion, or deletion, that results in one or more of the following properties: (1) reduced tropism in the liver; (2) de-targeted expression in the liver; (3) reduced activity in the liver; and/or (4) reduced binding to galactose. In some embodiments, the reduction in any one, or all of properties (1)-(3) is compared to an otherwise similar AAV capsid variant that does not comprise the modification. Exemplary modifications are provided in WO 2018/119330; Pulicherla et al. (2011) Mol. Ther. 19(6): 1070-1078; Adachi et al. (2014) Nature Communications 5(3075), DOI: 10.1038/ncomms4075; and Bell et al. (2012) J. Virol. 86(13): 7326-33; the contents of which are hereby incorporated by reference in their entirety. In some embodiments, the AAV capsid variant comprises a modification e.g., substitution (e.g., conservative substitution), insertion, or deletion, at position N470 (e.g., N470A), D271 (e.g., D271A), N272 (e.g., N272A), Y446 (e.g., Y446A), N498 (e.g., N498Y or N498I), W503 (e.g., W503R or W503A), L620 (e.g., L620F), or a combination thereof, relative to a reference sequence numbered according to SEQ ID NO: 138. In some embodiments, the AAV capsid variant comprises one, two, three, four, five or all of an amino acid other than N at position 470 (e.g., A), an amino acid other than D at position 271 (e.g., A), an amino acid other than N at position 272 (e.g., A), an amino acid other than Y at position 446 (e.g., A), and amino acid other than N at position 498 (e.g., Y or I), and amino acid other than W at position 503 (e.g., R or A), and amino acid other than L at position 620 (e.g., F), relative to a reference sequence numbered according to SEQ ID NO: 138. In some embodiments, the AAV capsid variant comprises a modification e.g., substitution (e.g., conservative substitution), insertion, or deletion, at position N470 (e.g., N470A), D271 (e.g., D271A), N272 (e.g., N272A), Y446 (e.g., Y446A), and W503 (e.g., W503R or W03A), relative to a reference sequence numbered according to SEQ ID NO: 138. In some embodiments, the AAV capsid variant comprises a modification e.g., substitution (e.g., conservative substitution), insertion, or deletion, at N498 (e.g., N498Y) and L620 (e.g., L620F).

[0555] In some embodiments, an AAV capsid variant comprised herein comprises a modification as described in Adachi et al. (2014) Nature Communications 5(3075), DOI: 10.1038/ncomms4075, the contents of which are hereby incorporated by reference in its entirety. Exemplary modifications that alter or do not alter tissue transduction in at least the brain, liver, heart, lung, and/or kidney can be found in Supplementary Data 2 showing the AAV Barcode-Seq data obtained with AAV9-AA-VBCLib of Adachi et al. (supra), the contents of which are hereby incorporated by reference in its entirety.

[0556] In some embodiments, an, AAV capsid polypeptide, e.g., an AAV capsid variant, of the present disclosure is isolated, e.g., recombinant. In some embodiments, a polynucleotide encoding an AAV capsid polypeptide, e.g., an AAV capsid variant, of the present disclosure is isolated, e.g., recombinant.

[0557] The present disclosure refers to structural capsid proteins (including VP1, VP2 and VP3) which are encoded by capsid (Cap) genes. These capsid proteins form an outer protein structural shell (i.e. capsid) of a viral vector such as AAV. VP capsid proteins synthesized from Cap polynucleotides generally include a methionine as the first amino acid in the peptide sequence (Met1), which is associated with the start codon (AUG or ATG) in the corresponding Cap nucleotide sequence. However, it is common for a first-methionine (Met1) residue or generally any first amino acid (AA1) to be cleaved off after or during polypeptide synthesis by protein processing enzymes such as Met-aminopeptidases. This “Met/AA-clipping” process often correlates with a corresponding acetylation of the second amino acid in the polypeptide sequence (e.g., alanine, valine, serine, threonine, etc.). Met-clipping commonly occurs with VP1 and VP3 capsid proteins but can also occur with VP2 capsid proteins.

[0558] Where the Met/AA-clipping is incomplete, a mixture of one or more (one, two or three) VP capsid proteins comprising the viral capsid may be produced, some of which may include a Met1/AA1 amino acid (Met+/AA+) and some of which may lack a Met1/AA1 amino acid as a result of Met/AA-clipping (Met−/AA−). For further discussion regarding Met/AA-clipping in capsid proteins, see Jin, et al. Direct Liquid Chromatography/Mass Spectrometry Analysis for Complete Characterization of Recombinant Adeno-Associated Virus Capsid Proteins. Hum Gene Ther Methods. 2017 Oct. 28(5):255-267; Hwang, et al. N-Terminal Acetylation of Cellular Proteins Creates Specific Degradation Signals. Science. 2010 Feb. 19. 327(5968):973-977; the contents of which are each incorporated herein by reference in its entirety.

[0559] According to the present disclosure, references to capsid proteins is not limited to either clipped (Met−/AA−) or unclipped (Met+/AA+) and may, in context, refer to independent capsid proteins, viral capsids comprised of a mixture of capsid proteins, and/or polynucleotide sequences (or fragments thereof) which encode, describe, produce or result in capsid proteins of the present disclosure. A direct reference to a “capsid protein” or “capsid polypeptide” (such as VP1, VP2 or VP2) may also comprise VP capsid proteins which include a Met1/AA1 amino acid (Met+/AA+) as well as corresponding VP capsid proteins which lack the Met1/AA1 amino acid as a result of Met/AA-clipping (Met−/AA−).

[0560] Further according to the present disclosure, a reference to a specific SEQ ID NO: (whether a protein or nucleic acid) which comprises or encodes, respectively, one or more capsid proteins which include a Met1/AA1 amino acid (Met+/AA+) should be understood to teach the VP capsid proteins which lack the Met1/AA1 amino acid as upon review of the sequence, it is readily apparent any sequence which merely lacks the first listed amino acid (whether or not Met1/AA1).

[0561] As a non-limiting example, reference to a VP1 polypeptide sequence which is 736 amino acids in length and which includes a “Met1” amino acid (Met+) encoded by the AUG/ATG start codon may also be understood to teach a VP1 polypeptide sequence which is 735 amino acids in length and which does not include the “Met1” amino acid (Met−) of the 736 amino acid Met+ sequence. As a second non-limiting example, reference to a VP1 polypeptide sequence which is 736 amino acids in length and which includes an “AA1” amino acid (AA1+) encoded by any NNN initiator codon may also be understood to teach a VP1 polypeptide sequence which is 735 amino acids in length and which does not include the “AA1” amino acid (AA1−) of the 736 amino acid AA1+ sequence.

[0562] References to viral capsids formed from VP capsid proteins (such as reference to specific AAV capsid serotypes), can incorporate VP capsid proteins which include a Met1/AA1 amino acid (Met+/AA1+), corresponding VP capsid proteins which lack the Met1/AA1 amino acid as a result of Met/AA1-clipping (Met−/AA1−), and combinations thereof (Met+/AA1+ and Met−/AA1−).

[0563] As a non-limiting example, an AAV capsid serotype can include VP1 (Met+/AA1+), VP1 (Met−/AA1−), or a combination of VP1 (Met+/AA1+) and VP1 (Met−/AA1−). An AAV capsid serotype can also include VP3 (Met+/AA1+), VP3 (Met−/AA1−), or a combination of VP3 (Met+/AA1+) and VP3 (Met−/AA1−); and can also include similar optional combinations of VP2 (Met+/AA1) and VP2 (Met−/AA1−).

[0564] Also provided herein are polynucleotide sequences encoding any of the AAV capsid variants described above and AAV particles, vectors, and cells comprising the same

### Viral Genome

[0565] In some aspects, an AAV particle of the present disclosure, e.g., an AAV particle comprising an AAV capsid polypeptide, e.g., an AAV capsid variant described herein, comprises a viral genome which encodes a an agent for targeting MAPT, e.g., a siRNA duplex for targeting MAPT or a modulatory polynucleotide encoding a siRNA duplex for targeting MAPT.

[0566] In some embodiments, an AAV particle as described herein comprising an AAV capsid polypeptide, e.g., AAV capsid variant, described herein, may be used for the delivery of a viral genome to a tissue (e.g., CNS, DRG, and/or muscle). In some embodiments, an AAV particle comprising an AAV capsid polypeptide, e.g., an AAV capsid variant, described herein can be used for delivery of a viral genome to a tissue or cell, e.g., CNS, DRG, or muscle cell or tissue. In some embodiments, an AAV particle of the present disclosure is a recombinant AAV particle. In some embodiments, an AAV particle of the present disclosure is an isolated AAV particle.

[0567] In some embodiments, the AAV particles described herein are used to deliver the agent to target MAPT (e.g., a MAPT targeting siRNA duplex or a modulatory polynucleotide encoding a siRNA duplex to cells of the CNS, after intravenous delivery.

[0568] In some embodiments, a viral genome of an AAV particle comprising an AAV capsid polypeptide, e.g., an AAV capsid variant, as described herein, comprises a nucleic acid comprising a transgene encoding the agent to target MAPT (e.g., a MAPT targeting siRNA duplex or a modulatory polynucleotide encoding a siRNA duplex (e.g., a siRNA duplex for targeting MAPT)). In some embodiments, the viral genome comprises an inverted terminal repeat (ITR) sequence. In some embodiments, the viral genome comprises two ITR sequences, e.g., one at the 5′ end of the viral genome (e.g., 5′ relative to the encoded payload) and one at the 3′ end of the viral genome (e.g., 3′ relative to the encoded payload). In some embodiments, a viral genome of the AAV particles described herein (e.g., comprising an AAV capsid variant described herein) may comprise a regulatory element (e.g., promoter), untranslated regions (UTR), a miR binding site a polyadenylation sequence (polyA), a filler or stuffer sequence, an intron, and/or a linker sequence, e.g., for enhancing transgene expression.

[0569] In some embodiments, the viral genome components are selected and/or engineered for expression of an agent for targeting MAPT (e.g., a MAPT targeting siRNA duplex or a modulatory polynucleotide encoding a siRNA duplex (e.g., a siRNA duplex for targeting MAPT)) in a target tissue (e.g., a CNS tissue, e.g., a brain tissue or a spinal cord tissue), or a target cell (e.g., a cell of the CNS, e.g., a brain cell or a spinal cord cell).

### Viral Genome Component: Inverted Terminal Repeats (ITRs)

[0570] In some embodiments, the viral genome comprises an ITR and a transgene encoding a payload. In some embodiment, the viral genome has two ITRs. In some embodiments, the two ITRs flank the nucleotide sequence encoding the payload at the 5′ and 3′ ends. In some embodiments, the ITRs function as origins of replication comprising recognition sites for replication. In some embodiments, the ITRs comprise sequence regions which can be complementary and symmetrically arranged. In some embodiments, the ITRs incorporated into viral genomes as described herein may be comprised of naturally occurring polynucleotide sequences or recombinantly derived polynucleotide sequences.

[0571] In some embodiments, the ITR may be of the same serotype as the capsid polypeptide, e.g., capsid variant, selected from any of the known serotypes, or a variant thereof. In some embodiments, the ITR may be of a different serotype than the capsid. In one embodiment, the viral genome comprises two ITR sequence regions, wherein the ITRs are of the same serotype as one another. In another embodiment, the viral genome comprises two ITR sequence regions, wherein the ITRs are of different serotypes. Non-limiting examples include zero, one or both of the ITRs having the same serotype as the capsid. In one embodiment both ITRs of the viral genome of the AAV particle are AAV2 ITRs.

[0572] In some embodiments, the ITR comprises the nucleotide sequence of SEQ ID NO: 5197, or a nucleotide sequence at least 70%, 75%, 80%, 85%, 90%, 92%, 95%, 96%, 97%, 98%, or 99% identical thereto. In some embodiments, the ITR comprises the nucleotide sequence of SEQ ID NO: 5200, or a nucleotide sequence at least 70%, 75%, 80%, 85%, 90%, 92%, 95%, 96%, 97%, 98%, or 99% identical thereto. In some embodiments, an AAV viral genome comprises an ITR comprising the nucleotide sequence of SEQ ID NO: 5197, or a nucleotide sequence at least 70%, 75%, 80%, 85%, 90%, 92%, 95%, 96%, 97%, 98%, or 99% identical thereto, and an ITR comprising the nucleotide sequence of SEQ ID NO: 5200, or a nucleotide sequence at least 70%, 75%, 80%, 85%, 90%, 92%, 95%, 96%, 97%, 98%, or 99% identical thereto.

[0573] In some embodiments, the ITR comprises the nucleotide sequence of SEQ ID NO: 4469, or a nucleotide sequence at least 70%, 75%, 80%, 85%, 90%, 92%, 95%, 96%, 97%, 98%, or 99% identical thereto. In some embodiments, the ITR comprises the nucleotide sequence of SEQ ID NO: 4470, or a nucleotide sequence at least 70%, 75%, 80%, 85%, 90%, 92%, 95%, 96%, 97%, 98%, or 99% identical thereto. In some embodiments, an AAV viral genome comprises an ITR comprising the nucleotide sequence of SEQ ID NO: 4469, or a nucleotide sequence at least 70%, 75%, 80%, 85%, 90%, 92%, 95%, 96%, 97%, 98%, or 99% identical thereto, and an ITR comprising the nucleotide sequence of SEQ ID NO: 4470, or a nucleotide sequence at least 70%, 75%, 80%, 85%, 90%, 92%, 95%, 96%, 97%, 98%, or 99% identical thereto.

### Viral Genome Component: Promoters

[0574] In some embodiments, the viral genome comprises at least one element to enhance the payload target specificity and expression (See e.g., Powell et al. Viral Expression Cassette Elements to Enhance Transgene Target Specificity and Expression in Gene Therapy, 2015; the contents of which are herein incorporated by reference in their entirety). Non-limiting examples of elements to enhance payload target specificity and expression include promoters, endogenous miRNAs, post-transcriptional regulatory elements (PREs), polyadenylation (PolyA) signal sequences and upstream enhancers (USEs), CMV enhancers and introns.

[0575] In some embodiments, an AAV particle comprising an AAV capsid variant described herein comprises a viral genome comprising a nucleic acid comprising a transgene encoding a payload, wherein the transgene is operably linked to a promoter. In some embodiments, the promoter is a species-specific promoter, an inducible promoter, a tissue-specific promoter, or a cell cycle-specific promoter (e.g., a promoter as described in Parr et al., Nat. Med. 3:1145-9(1997); the contents of which are herein incorporated by reference in their entirety).

[0576] In some embodiments, the promoter may be naturally occurring or non-naturally occurring. Non-limiting examples of promoters include those derived from viruses, plants, mammals, or humans. In some embodiments, the promoters may be those derived from human cells or systems. In some embodiments, the promoter may be truncated or mutated, e.g., a promoter variant.

[0577] In some embodiments, the promoter is a ubiquitous promoter, e.g., capable of expression in multiple tissues. In some embodiments the promoter is a human elongation factor 1α-subunit (EF1α) promoter, the cytomegalovirus (CMV) immediate-early enhancer and/or promoter, the chicken β-actin (CBA) promoter and its derivative CAG, B glucuronidase (GUSB) promoter, or ubiquitin C (UBC) promoter. In some embodiments, the promoter is a cell or tissue specific promoter, e.g., capable of expression in tissues or cells of the central or peripheral nervous systems, targeted regions within (e.g., frontal cortex), and/or sub-sets of cells therein (e.g., excitatory neurons). In some embodiments, the promoter is a cell-type specific promoters capable of expression of a payload in excitatory neurons (e.g., glutamatergic), inhibitory neurons (e.g., GABA-crgic), neurons of the sympathetic or parasympathetic nervous system, sensory neurons, neurons of the dorsal root ganglia, motor neurons, or supportive cells of the nervous systems such as microglia, glial cells, astrocytes, oligodendrocytes, and/or Schwann cells.

[0578] In some embodiments, the promoter is a liver specific promoter (e.g., hAAT, TBG), skeletal muscle specific promoter (e.g., desmin, MCK, C512), B cell promoter, monocyte promoter, leukocyte promoter, macrophage promoter, pancreatic acinar cell promoter, endothelial cell promoter, lung tissue promoter, and/or cardiac or cardiovascular promoter (e.g., αMHC, cTnT, and CMV-MLC2k).

[0579] In some embodiments, the promoter is a tissue-specific promoter for payload expression in a tissue or cell of the central nervous system. In some embodiments, the promoter is a synapsin (Syn) promoter, glutamate vesicular transporter (VGLUT) promoter, vesicular GABA transporter (VGAT) promoter, parvalbumin (PV) promoter, sodium channel Nav 1.8 promoter, tyrosine hydroxylase (TH) promoter, choline acetyltransferase (ChaT) promoter, methyl-CpG binding protein 2 (MeCP2) promoter, Ca2+/calmodulin-dependent protein kinase II (CaMKII) promoter, metabotropic glutamate receptor 2 (mGluR2) promoter, neurofilament light chain (NFL) or heavy chain (NFH) promoter, neuron-specific enolase (NSE) promoter, β-globin minigene nβ2 promoter, preproenkephalin (PPE) promoter, enkephalin (Enk) promoter, and excitatory amino acid transporter 2 (EAAT2) promoter, or a fragment thereof. In some embodiments, the promoter is a cell-type specific promoter capable of expression in an astrocyte, e.g., a glial fibrillary acidic protein (GFAP) promoter and a EAAT2 promoter, or a fragment thereof. In some embodiments, the promoter is a cell-type specific promoter capable of expression in an oligodendrocyte, e.g., a myelin basic protein (MBP) promoter or a fragment thereof.

[0580] In some embodiments, the promoter is a GFAP promoter. In some embodiments, the promoter is a synapsin (syn or syn1) promoter, or a fragment thereof.

[0581] In some embodiments, the promoter comprises a CBA promoter or a variant thereof, e.g., a functional variant thereof. In some embodiments, the promoter comprises the nucleotide sequence of SEQ ID NO: 5199, or a nucleotide sequence at least 70%, 75%, 80%, 85%, 90%, 92%, 95%, 96%, 97%, 98%, or 99% identical thereto.

[0582] In some embodiments, the AAV viral genome comprises an enhancer. In some embodiments, the enhancer comprises a CMVie enhancer, or a variant thereof. In some embodiments, the enhancer comprises the nucleotide sequence of SEQ ID NO: 4471, or a nucleotide sequence at least 70%, 75%, 80%, 85%, 90%, 92%, 95%, 96%, 97%, 98%, or 99% identical thereto. In some embodiments, the enhancer comprises the nucleotide sequence of SEQ ID NO: 4472, or a nucleotide sequence at least 70%, 75%, 80%, 85%, 90%, 92%, 95%, 96%, 97%, 98%, or 99% identical thereto.

[0583] In some embodiments, the AAV viral genome comprises an enhancer and a promoter. In some embodiments, the enhancer comprises a CMVie enhancer and the promoter comprises a CBA promoter. In some embodiments, the enhancer and the promoter comprise the nucleotide sequence of SEQ ID NO: 4474, or a nucleotide sequence at least 70%, 75%, 80%, 85%, 90%, 92%, 95%, 96%, 97%, 98%, or 99% identical thereto.

[0584] In some embodiments, the promoter comprises an insulin promoter or a fragment thereof.

[0585] In some embodiments, the viral genome comprises a ubiquitous promoter. Non-limiting examples of ubiquitous promoters include CMV, CBA (including derivatives CAG, CB6, CBh, etc.), EF-1α, PGK, UBC, GUSB (hGBp), and UCOE (promoter of HNRPA2B1-CBX3). In some embodiments, the viral genome comprises an EF-1α promoter or EF-1α promoter variant, e.g., as provided in Table 2. In some embodiments, the EF-1α promoter comprises the nucleotide sequence of any one of SEQ ID NOs: 1874-1889 or any of the sequences provided in Table 40, a nucleotide sequence comprising at least one, two, or three but no more than four modifications, e.g., substitutions, relative to the nucleotide sequence of SEQ ID NOs: 1874-1889 or any of the sequences provided in Table 40, or a nucleotide sequence with at least 80% (e.g., 85%, 90%, 95%, 96%, 97%, 98%, or 99%) sequence identity to any one of SEQ ID NOs: 1874-1889 or any of the sequences provided in Table 2.

TABLE 2
Exemplary Promoter Variants

| | | SEQ ID |
|---|---|---|
| Description | Sequences | NO: |
| EF1a Promoter | CGTGAGGCTCCGGTGCCCGTCAGTGGGCAGAGCGCACATCGCCCACAGTCCCCG | 1874 |
| (intron | AGAAGTTGGGGGGAGGGGTCGGCAATTGAACCGGTGCCTAGAGAAGGTGGCGCG | |
| underlined) | GGGTAAACTGGGAAAGTGATGTCGTGTACTGGCTCCGCCTTTTTCCCGAGGGTG | |
| | GGGGAGAACCGTATATAAGTGCAGTAGTCGCCGTGAACGTTCTTTTTCGCAACG | |
| | GGTTTGCCGCCAGAACACAGGTAAGTGCCGTGTGTGGTTCCCGCGGGCCTGGCC | |
| | TCTTTACGGGTTATGGCCCTTGCGTGCCTTGAATTACTTCCACCTGGCTGCAGT | |
| | ACGTGATTCTTGATCCCGAGCTTCGGGTTGGAAGTGGGTGGGAGAGTTCGAGGC | |
| | CTTGCGCTTAAGGAGCCCCTTCGCCTCGTGCTTGAGTTGAGGCCTGGCCTGGGC | |
| | GCTGGGGCCGCCGCGTGCGAATCTGGTGGCACCTTCGCGCCTGTCTCGCTGCTT | |
| | TCGATAAGTCTCTAGCCATTTAAAATTTTTGATGACCTGCTGCGACGCTTTTTT | |
| | TCTGGCAAGATAGTCTTGTAAATGCGGGCCAAGATCTGCACACTGGTATTTCGG | |
| | TTTTTGGGGCCGCGGGCGGCGACGGGGCCCGTGCGTCCCAGCGCACATGTTCGG | |
| | CGAGGCGGGGCCTGCGAGCGCGGCCACCGAGAATCGGACGGGGGTAGTCTCAAG | |
| | CTGGCCGGCCTGCTCTGGTGCCTGGCCTCGCGCCGCCGTGTATCGCCCCGCCCT | |
| | GGGCGGCAAGGCTGGCCCGGTCGGCACCAGTTGCGTGAGCGGAAAGATGGCCGC | |
| | TTCCCGGCCCTGCTGCAGGGAGCTCAAAATGGAGGACGCGGCGCTCGGGAGAGC | |
| | GGGCGGGTGAGTCACCCACACAAAGGAAAAGGGCCTTTCCGTCCTCAGCCGTCG | |
| | CTTCATGTGACTCCACGGAGTACCGGGCGCCGTCCAGGCACCTCGATTAGTTCT | |
| | CGAGCTTTTGGAGTACGTCGTCTTTAGGTTGGGGGGAGGGGTTTTATGCGATGG | |
| | AGTTTCCCCACACTGAGTGGGTGGAGACTGAAGTTAGGCCAGCTTGGCACTTGA | |
| | TGTAATTCTCCTTGGAATTTGCCCTTTTTGAGTTTGGATCTTGGTTCATTCTCA | |
| | AGCCTCAGACAGTGGTTCAAAGTTTTTTTCTTCCATTTCAGGTGTCGTGA | |
| miniEFla | GCCCGTCAGTGGGCAGAGCGCACATCGCCCACAGTCCCCGAGAAGTTGGGGGGA | 1875 |
| | GGGGTCGGCAATTGAACCGGTGCCTAGAGAAGGTGGCGCGGGGTAAACTGGGAA | |
| | AGTGATGTCGTGTACTGGCTCCGCCTTTTTCCCGAGGGTGGGGGAGAACCGTAT | |
| | ATAAGTGCAGTAGTCGCCGTGAACGTTCTTTTTCGCAACGGGTTTGCCGCCAGA | |
| | ACACGCGTAAG | |
| Promoter | GCATG | |
| Variant 1 | | |
| Promoter | GGTGGAGAAGAGCATG | 1876 |
| Variant 2 | | |
| Promoter | GTCATCACTGAGGTGGAGAAGAGCATG | 1877 |
| Variant 3 | | |
| Promoter | CGTGAG | |
| Variant 4 | | |
| Promoter | GT | |
| Variant 5 | | |
| Promoter | GCTCCGGT | |
| Variant 6 | | |
| Promoter | GCCCGTCAGTGGGCAGAGCGCACATCGCCCACAGTCCCCGAGAAGTTGGGGGGA | 1878 |
| Variant 19 | GGGGTCGGCAATTGAACCGGTGCCTAGAGAAGGTGGCGCGGGGTAAACTGGGAA | |
| | AGTGATGTCGTGTACTGGCTCCGCCTTTTTCCCGAGGGTGGGGGAGAACCGTAT | |
| | ATAAGTGCAGTAGTCGCCGTGAACGTTCTTTTTCGCAACGGGTTTGCCGCCAGA | |
| | ACACAG | |
| Promoter | GCCCGTCAGTGGGCAGAGCGCACATCGCCCACAGTCCCCGAGAAGTTGGGGGGA | 1879 |
| Variant 20 | GGGGTCGGCAATTGAACCGGTGCCTAGAGAAGGTGGCGCGGGGTAAACTGGGAA | |
| | AGTGATGTCGTGTACTGGCTCCGCCTTTTTCCCGAGGGTGGGGGAGAACCGTAT | |
| | ATAAGTGCAGTAGTCGCCGTGAACGTTCTTTTTCGCAACGGGTTTGCCGCCAGA | |
| | ACACGC | |
| Promoter | GTAAG | |
| Variant 7 | | |
| Promoter | GTGCCCGTCAGTGGGCAGAGCGCACATCGCCCACAGTCCCCGAGAAGTTGGGGG | 1880 |
| Variant 8 | GAGGGGTCGGCAATTGAACCGGTGCCTAGAGAAGGTGGCGCGGGGTAAACTGGG | |
| | AAAGTGATGTCGTGTACTGGCTCCGCCTTTTTCCCGAGGGTGGGGGAGAACCGT | |
| | ATATAAGTGCAGTAGTCGCCGTGAACGTTCTTTTTCGCAACGGGTTTGCCGCCA | |
| | GAACACGCGTAAG | |
| Promoter | GCTCCGGTGCCCGTCAGTGGGCAGAGCGCACATCGCCCACAGTCCCCGAGAAGT | 1881 |
| Variant 9 | TGGGGGGAGGGGTCGGCAATTGAACCGGTGCCTAGAGAAGGTGGCGCGGGGTAA | |
| | ACTGGGAAAGTGATGTCGTGTACTGGCTCCGCCTTTTTCCCGAGGGTGGGGGAG | |
| | AACCGTATATAAGTGCAGTAGTCGCCGTGAACGTTCTTTTTCGCAACGGGTTTG | |
| | CCGCCAGAACACGCGTAAG | |
| Promoter | CGTGAGGCTCCGGTGCCCGTCAGTGGGCAGAGCGCACATCGCCCACAGTCCCCG | 1882 |
| Variant 10 | AGAAGTTGGGGGGAGGGGTCGGCAATTGAACCGGTGCCTAGAGAAGGTGGCGCG | |
| | GGGTAAACTGGGAAAGTGATGTCGTGTACTGGCTCCGCCTTTTTCCCGAGGGTG | |
| | GGGGAGAACCGTATATAAGTGCAGTAGTCGCCGTGAACGTTCTTTTTCGCAACG | |
| | GGTTTGCCGCCAGAACACGCGTAAG | |
| Promoter | CGTGAGGCTCCGGTGCCCGTCAGTGGGCAGAGCGCACATCGCCCACAGTCCCCG | 1883 |
| Variant 11 | AGAAGTTGGGGGGAGGGGTCGGCAATTGAACCGGTGCCTAGAGAAGGTGGCGCG | |
| | GGGTAAACTGGGAAAGTGATGTCGTGTACTGGCTCCGCCTTTTTCCCGAGGGTG | |
| | GGGGAGAACCGTATATAAGTGCAGTAGTCGCCGTGAACGTTCTTTTTCGCAACG | |
| | GGTTTGCCGCCAGAACACAG | |
| Promoter | GCATGCGTGAGGCTCCGGTGCCCGTCAGTGGGCAGAGCGCACATCGCCCACAGT | 1884 |
| Variant | CCCCGAGAAGTTGGGGGGAGGGGTCGGCAATTGAACCGGTGCCTAGAGAAGGTG | |
| 12 | GCGCGGGGTAAACTGGGAAAGTGATGTCGTGTACTGGCTCCGCCTTTTTCCCGA | |
| | GGGTGGGGGAGAACCGTATATAAGTGCAGTAGTCGCCGTGAACGTTCTTTTTCG | |
| | CAACGGGTTTGCCGCCAGAACACGCGTAAG | |
| Promoter | GCATGCGTGAGGCTCCGGTGCCCGTCAGTGGGCAGAGCGCACATCGCCCACAGT | 1885 |
| Variant 13 | CCCCGAGAAGTTGGGGGGAGGGGTCGGCAATTGAACCGGTGCCTAGAGAAGGTG | |
| | GCGCGGGGTAAACTGGGAAAGTGATGTCGTGTACTGGCTCCGCCTTTTTCCCGA | |
| | GGGTGGGGGAGAACCGTATATAAGTGCAGTAGTCGCCGTGAACGTTCTTTTTCG | |
| | CAACGGGTTTGCCGCCAGAACACAG | |
| Promoter | GGTGGAGAAGAGCATGCGTGAGGCTCCGGTGCCCGTCAGTGGGCAGAGCGCACA | 1886 |
| Variant 14 | TCGCCCACAGTCCCCGAGAAGTTGGGGGGAGGGGTCGGCAATTGAACCGGTGCC | |
| | TAGAGAAGGTGGCGCGGGGTAAACTGGGAAAGTGATGTCGTGTACTGGCTCCGC | |
| | CTTTTTCCCGAGGGTGGGGGAGAACCGTATATAAGTGCAGTAGTCGCCGTGAAC | |
| | GTTCTTTTTCGCAACGGGTTTGCCGCCAGAACACGCGTAAG | |
| Promoter | GGTGGAGAAGAGCATGCGTGAGGCTCCGGTGCCCGTCAGTGGGCAGAGCGCACA | 1887 |
| Variant 15 | TCGCCCACAGTCCCCGAGAAGTTGGGGGGAGGGGTCGGCAATTGAACCGGTGCC | |
| | TAGAGAAGGTGGCGCGGGGTAAACTGGGAAAGTGATGTCGTGTACTGGCTCCGC | |
| | CTTTTTCCCGAGGGTGGGGGAGAACCGTATATAAGTGCAGTAGTCGCCGTGAAC | |
| | GTTCTTTTTCGCAACGGGTTTGCCGCCAGAACACAG | |
| Promoter | GTCATCACTGAGGTGGAGAAGAGCATGCGTGAGGCTCCGGTGCCCGTCAGTGGG | 1888 |
| Variant 16 | CAGAGCGCACATCGCCCACAGTCCCCGAGAAGTTGGGGGGAGGGGTCGGCAATT | |
| | GAACCGGTGCCTAGAGAAGGTGGCGCGGGGTAAACTGGGAAAGTGATGTCGTGT | |
| | ACTGGCTCCGCCTTTTTCCCGAGGGTGGGGGAGAACCGTATATAAGTGCAGTAG | |
| | TCGCCGTGAACGTTCTTTTTCGCAACGGGTTTGCCGCCAGAACACGCGTAAG | |
| Promoter | GTCATCACTGAGGTGGAGAAGAGCATGCGTGAGGCTCCGGTGCCCGTCAGTGGG | 1889 |
| Variant | CAGAGCGCACATCGCCCACAGTCCCCGAGAAGTTGGGGGGAGGGGTCGGCAATT | |
| 18 | GAACCGGTGCCTAGAGAAGGTGGCGCGGGGTAAACTGGGAAAGTGATGTCGTGT | |
| | ACTGGCTCCGCCTTTTTCCCGAGGGTGGGGGAGAACCGTATATAAGTGCAGTAG | |
| | TCGCCGTGAACGTTCTTTTTCGCAACGGGTTTGCCGCCAGAACACAG | |

### Viral Genome Component: Introns

[0586] In some embodiments, the viral genome comprises an element to enhance the payload target specificity and expression (See e.g., Powell et al. Viral Expression Cassette Elements to Enhance Transgene Target Specificity and Expression in Gene Therapy, Discov. Med, 2015, 19(102):49-57; the contents of which are herein incorporated by reference in their entirety), such as an intron. Non-limiting examples of introns include, MVM (67-97 bps), F.IX truncated intron 1 (300 bps), β-globin SD/immunoglobulin heavy chain splice acceptor (250 bps), adenovirus splice donor/immunoglobin splice acceptor (500 bps), SV40 late splice donor/splice acceptor (19S/16S) (180 bps) and hybrid adenovirus splice donor/IgG splice acceptor (230 bps). In some embodiments, the intron comprises a human beta-globin intron or a variant thereof.

[0587] In some embodiments, the intron comprises the nucleotide sequence of SEQ ID NO: 4475, or a nucleotide sequence at least 70%, 75%, 80%, 85%, 90%, 92%, 95%, 96%, 97%, 98%, or 99% identical thereto.

### Viral Genome Component: Untranslated Regions (UTRs)

[0588] In some embodiments, a wild type untranslated region (UTR) of a gene is transcribed but not translated. Generally, the 5′ UTR starts at the transcription start site and ends at the start codon and the 3′ UTR starts immediately following the stop codon and continues until the termination signal for transcription.

[0589] Features typically found in abundantly expressed genes of specific target organs may be engineered into UTRs to enhance the stability and protein production. As a non-limiting example, a 5′ UTR from mRNA normally expressed in the liver (e.g., albumin, serum amyloid A, Apolipoprotein A/B/E, transferrin, alpha fetoprotein, erythropoietin, or Factor VIII) may be used in the viral genomes of the AAV particles of the disclosure to enhance expression in hepatic cell lines or liver.

[0590] In some embodiments, the viral genome encoding a transgene described herein (e.g., a transgene encoding a GBA protein) comprises a Kozak sequence. While not wishing to be bound by theory, wild-type 5′ untranslated regions (UTRs) include features that play roles in translation initiation. Kozak sequences, which are commonly known to be involved in the process by which the ribosome initiates translation of many genes, are usually included in 5′ UTRs. Kozak sequences have the consensus CCR (A/G) CCAUGG, where R is a purine (adenine or guanine) three bases upstream of the start codon (ATG), which is followed by another ‘G’.

[0591] In some embodiments, the 5′UTR in the viral genome includes a Kozak sequence.

[0592] In some embodiments, the 5′UTR in the viral genome does not include a Kozak sequence.

[0593] While not wishing to be bound by theory, wild-type 3′ UTRs are known to have stretches of adenosines and uridines embedded therein. These AU rich signatures are particularly prevalent in genes with high rates of turnover. Based on their sequence features and functional properties, the AU rich elements (AREs) can be separated into three classes (Chen et al, 1995, the contents of which are herein incorporated by reference in their entirety): Class I AREs, such as, but not limited to, c-Myc and MyoD, contain several dispersed copies of an AUUUA motif within U-rich regions. Class II AREs, such as, but not limited to, GM-CSF and TNF-a, possess two or more overlapping UUAUUUA (U/A) (U/A) nonamers. Class III ARES, such as, but not limited to, c-Jun and Myogenin, are less well defined. These U rich regions do not contain an AUUUA motif. Most proteins binding to the AREs are known to destabilize the messenger, whereas members of the ELAV family, most notably HuR, have been documented to increase the stability of mRNA. HuR binds to AREs of all the three classes. Engineering the HuR specific binding sites into the 3′ UTR of nucleic acid molecules will lead to HuR binding and thus, stabilization of the message in vivo.

[0594] Introduction, removal or modification of 3′ UTR AU rich elements (AREs) can be used to modulate the stability of polynucleotides. When engineering specific polynucleotides, e.g., payload regions of viral genomes, one or more copies of an ARE can be introduced to make polynucleotides less stable and thereby curtail translation and decrease production of the resultant protein. Likewise, AREs can be identified and removed or mutated to increase the intracellular stability and thus increase translation and production of the resultant protein.

[0595] In some embodiments, the 3′ UTR of the viral genome may include an oligo (dT) sequence for templated addition of a poly-A tail.

[0596] Any UTR from any gene known in the art may be incorporated into the viral genome of the AAV particle. These UTRs, or portions thereof, may be placed in the same orientation as in the gene from which they were selected or they may be altered in orientation or location. In some embodiments, the UTR used in the viral genome of the AAV particle may be inverted, shortened, lengthened, or made with one or more other 5′ UTRs or 3′ UTRs known in the art. As used herein, the term “altered,” as it relates to a UTR, means that the UTR has been changed in some way in relation to a reference sequence. For example, a 3′ or 5′ UTR may be altered relative to a wild type or native UTR by the change in orientation or location as taught above or may be altered by the inclusion of additional nucleotides, deletion of nucleotides, swapping or transposition of nucleotides.

[0597] In some embodiments, the viral genome of the AAV particle comprises at least one artificial UTR, which is not a variant of a wild type UTR.

[0598] In some embodiments, the viral genome of the AAV particle comprises UTRs which have been selected from a family of transcripts whose proteins share a common function, structure, feature, or property.

### Viral Genome Component: miR Binding Site

[0599] Tissue- or cell-specific expression of the AAV viral particles of the invention can be enhanced by introducing tissue- or cell-specific regulatory sequences, e.g., promoters, enhancers, microRNA binding sites, e.g., a detargeting site. Without wishing to be bound by theory, it is believed that an encoded miR binding site can modulate, e.g., prevent, suppress, or otherwise inhibit, the expression of a gene of interest on the viral genome of the invention, based on the expression of the corresponding endogenous microRNA (miRNA) or a corresponding controlled exogenous miRNA in a tissue or cell, e.g., a non-targeting cell or tissue. In some embodiments, a miR binding site modulates, e.g., reduces, expression of the payload encoded by a viral genome of an AAV particle described herein in a cell or tissue where the corresponding mRNA is expressed. In some embodiments, the miR binding site modulates, e.g., reduces, expression of the encoded GBA protein in a cell or tissue of the DRG, liver, hematopoietic lineage, or a combination thereof.

[0600] In some embodiments, the viral genome of an AAV particle described herein comprises a nucleotide sequence encoding a microRNA binding site, e.g., a detargeting site. In some embodiments, the viral genome of an AAV particle described herein comprises a nucleotide sequence encoding a miR binding site, a microRNA binding site series (miR BSs), or a reverse complement thereof.

[0601] In some embodiments, the nucleotide sequence encoding the miR binding site series or the miR binding site is located in the 3′-UTR region of the viral genome (e.g., 3′ relative to the nucleic acid sequence encoding a payload), e.g., before the polyA sequence, 5′-UTR region of the viral genome (e.g., 5′ relative to the nucleic acid sequence encoding a payload), or both.

[0602] In some embodiments, the encoded miR binding site series comprise at least 1-5 copies, e.g., at least 1-3, 2-4, 3-5, 1, 2, 3, 4, 5 or more copies of a miR binding site (miR BS). In some embodiments, the encoded miR binding site series comprises 4 copies of a miR binding site. In some embodiments, all copies are identical, e.g., comprise the same miR binding site. In some embodiments, the miR binding sites within the encoded miR binding site series are continuous and not separated by a spacer. In some embodiments, the miR binding sites within an encoded miR binding site series are separated by a spacer, e.g., a non-coding sequence. In some embodiments, the spacer is about 1 to 6 nucleotides or about 5 to 10 nucleotides, e.g., about 7-8 nucleotides, nucleotides in length. In some embodiments, the spacer is about 8 nucleotides in length. In some embodiments, the spacer sequence comprises one or more of (i) GGAT; (ii) CACGTG; (iii) GCATGC, or a repeat of one or more of (i)-(iii). In some embodiments, the spacer comprises the nucleotide sequence of GATAGTTA, or a nucleotide sequence having at least one, two, or three modifications, but no more than four modifications of GATAGTTA.

[0603] In some embodiments, the encoded miR binding site series comprise at least 1-5 copies, e.g., at least 1-3, 2-4, 3-5, 1, 2, 3, 4, 5 or more copies of a miR binding site (miR BS). In some embodiments, at least 1, 2, 3, 4, 5, or all of the copies are different, e.g., comprise a different miR binding site. In some embodiments, the miR binding sites within the encoded miR binding site series are continuous and not separated by a spacer. In some embodiments, the miR binding sites within an encoded miR binding site series are separated by a spacer, e.g., a non-coding sequence. In some embodiments, the spacer is about 1 to 6 nucleotides or about 5 to 10 nucleotides, e.g., about 7-8 nucleotides or about 8 nucleotides, in length. In some embodiments, the spacer sequence comprises one or more of (i) GGAT; (ii) CACGTG; (iii) GCATGC, or a repeat of one or more of (i)-(iii). In some embodiments, the spacer comprises the nucleotide sequence of GATAGTTA, or a nucleotide sequence having at least one, two, or three modifications, but no more than four modifications of GATAGTTA.

[0604] In some embodiments, the encoded miR binding site is substantially identical (e.g., at least 70%, 75%, 80%, 85%, 90%, 95%, 99% or 100% identical), to the miR in the host cell. In some embodiments, the encoded miR binding site comprises at least 1, 2, 3, 4, or 5 mismatches or no more than 6, 7, 8, 9, or 10 mismatches to a miR in the host cell. In some embodiments, the mismatched nucleotides are contiguous. In some embodiments, the mismatched nucleotides are non-contiguous. In some embodiments, the mismatched nucleotides occur outside the seed region-binding sequence of the miR binding site, such as at one or both ends of the miR binding site. In some embodiments, the encoded miR binding site is 100% identical to the miR in the host cell.

[0605] In some embodiments, the nucleotide sequence encoding the miR binding site is substantially complimentary (e.g., at least 70%, 75%, 80%, 85%, 90%, 95%, 99% or 100% complementary), to the miR in the host cell. In some embodiments, the sequence complementary to the nucleotide sequence encoding the miR binding site comprises at least 1, 2, 3, 4, or 5 mismatches or no more than 6, 7, 8, 9, or 10 mismatches relative to the corresponding miR in the host cell. In some embodiments, the mismatched nucleotides are contiguous. In some embodiments, the mismatched nucleotides are non-contiguous. In some embodiments, the mismatched nucleotides occur outside the seed region-binding sequence of the miR binding site, such as at one or both ends of the miR binding site. In some embodiments, the encoded miR binding site is 100% complementary to the miR in the host cell.

[0606] In some embodiments, the encoded miR binding site or the encoded miR binding site series is about 10 to about 125 nucleotides in length, e.g., about 10 to 50 nucleotides, 10 to 100 nucleotides, 50 to 100 nucleotides, 50 to 125 nucleotides, or 100 to 125 nucleotides in length. In some embodiments, an encoded miR binding site or the encoded miR binding site series is about 7 to about 28 nucleotides in length, e.g., about 8-28 nucleotides, 7-28 nucleotides, 8-18 nucleotides, 12-28 nucleotides, 20-26 nucleotides, 22 nucleotides, 24 nucleotides, or 26 nucleotides in length, and optionally comprises at least one consecutive region (e.g., 7 or 8 nucleotides) complementary (e.g., full complementary or partially complementary) to the seed sequence of a miRNA (e.g., a miR122, a miR 142, a miR-1, a miR183).

[0607] In some embodiments, the encoded miR binding site is complementary (e.g., fully complementary or partially complementary) to a miR expressed in liver or hepatocytes, such as miR122. In some embodiments, the encoded miR binding site or encoded miR binding site series comprises a miR122 binding site sequence. In some embodiments, the encoded miR122 binding site comprises the nucleotide sequence of ACAAACACCATTGTCACACTCCA (SEQ ID NO: 1865), or a nucleotide sequence having at least 50%, 55%, 60%, 65%, 70%, 75%, 80%, 85%, 90%, at least 95%, at least 99%, or 100% sequence identity, or having at least one, two, three, four, five, six, or seven modifications but no more than ten modifications to SEQ ID NO: 1865, e.g., wherein the modification can result in a mismatch between the encoded miR binding site and the corresponding miRNA. In some embodiments, the viral genome comprises at least 3, 4, or 5 copies of the encoded miR122 binding site, e.g., an encoded miR122 binding site series, optionally wherein the encoded miR122 binding site series comprises the nucleotide sequence of: ACAAACACCATTGTCACACTCCACACAAACACCATTGTCACACTCCACACAAACACCATTGTCACACTCCA (SEQ ID NO: 1866), or a nucleotide sequence having at least 50%, 55%, 60%, 65%, 70%, 75%, 80%, 85%, 90%, at least 95%, at least 99%, or 100% sequence identity, or having at least one, two, three, four, five, six, or seven modifications but no more than ten modifications to SEQ ID NO: 1866, e.g., wherein the modification can result in a mismatch between the encoded miR binding site and the corresponding miRNA. In some embodiments, at least two of the encoded miR122 binding sites are connected directly, e.g., without a spacer. In other embodiments, at least two of the encoded miR 122 binding sites are separated by a spacer, e.g., 1, 2, 3, 4, 5, 6, 7, 8, 9, or 10 nucleotides in length, which is located between two or more consecutive encoded miR122 binding site sequences. In embodiments, the spacer is about 1 to 6 nucleotides or about 5 to 10 nucleotides, e.g., about 7-8 nucleotides or about 8 nucleotides, in length. In some embodiments, the spacer sequence comprises one or more of (i) GGAT; (ii) CACGTG; (iii) GCATGC, or a repeat of one or more of (i)-(iii). In some embodiments, the spacer comprises the nucleotide sequence of GATAGTTA, or a nucleotide sequence having at least one, two, or three modifications, but no more than four modifications of GATAGTTA.

[0608] In some embodiments, the encoded miR binding site is complementary (e.g., fully or partially complementary) to a miR expressed in the heart. In embodiments, the encoded miR binding site or encoded miR binding site series comprises a miR-1 binding site. In some embodiments, the encoded miR-1 binding site comprises the nucleotide sequence of ATACATACTTCTTTACATTCCA (SEQ ID NO: 5025), a nucleotide sequence having at least 50%, 55%, 60%, 65%, 70%, 75%, 80%, 85%, 90%, at least 95%, at least 99%, or 100% sequence identity, or having at least one, two, three, four, five, six, or seven modifications but no more than ten modifications to SEQ ID NO: 5025, e.g., wherein the modification can result in a mismatch between the encoded miR binding site and the corresponding miRNA. In some embodiments, the viral genome comprises at least 2, 3, 4, or 5 copies of the encoded miR-1 binding site, e.g., an encoded miR-1 binding site series. In some embodiments, the at least 2, 3, 4, or 5 copies (e.g., 2 or 3 copies) of the encoded miR-1 binding site are continuous (e.g., not separated by a spacer) or separated by a spacer. In some embodiments, the spacer is about 1 to 6 nucleotides or about 5 to 10 nucleotides, e.g., about 7-8 nucleotides or about 8 nucleotides, in length. In some embodiments, the spacer sequence comprises one or more of (i) GGAT; (ii) CACGTG; (iii) GCATGC, or a repeat of one or more of (i)-(iii). In some embodiments, the spacer comprises the nucleotide sequence of GATAGTTA, or a nucleotide sequence having at least one, two, or three modifications, but no more than four modifications of GATAGTTA.

[0609] In some embodiments, the encoded miR binding site is complementary (e.g., fully complementary or partially complementary) to a miR expressed in hematopoietic lineage, including immune cells (e.g., antigen presenting cells or APC, including dendritic cells (DCs), macrophages, and B-lymphocytes). In some embodiments, the encoded miR binding site is complementary (e.g., fully complementary or partially complementary) to a miR expressed in hematopoietic lineage comprises a nucleotide sequence disclosed, e.g., in US 2018/0066279, the contents of which are incorporated by reference herein in its entirety.

[0610] In some embodiments, the encoded miR binding site or encoded miR binding site series comprises a miR-142-3p binding site sequence. In some embodiments, the encoded miR-142-3p binding site comprises the nucleotide sequence of TCCATAAAGTAGGAAACACTACA (SEQ ID NO: 1869), a nucleotide sequence having at least 50%, 55%, 60%, 65%, 70%, 75%, 80%, 85%, 90%, at least 95%, at least 99%, or 100% sequence identity, or having at least one, two, three, four, five, six, or seven modifications but no more than ten modifications to SEQ ID NO: 1842, e.g., wherein the modification can result in a mismatch between the encoded miR binding site and the corresponding miRNA. In some embodiments, the viral genome comprises at least 3, 4, or 5 copies of an encoded miR-142-3p binding site, e.g., an encoded miR-142-3p binding site series. In some embodiments, the at least 3, 4, or 5 copies (e.g., 4 copies) of the encoded miR-142-3p binding site are continuous (e.g., not separated by a spacer) or separated by a spacer. In some embodiments, the spacer is about 1 to 6 nucleotides or about 5 to 10 nucleotides, e.g., about 7-8 nucleotides or about 8 nucleotides, in length. In some embodiments, the spacer sequence comprises one or more of (i) GGAT; (ii) CACGTG; (iii) GCATGC, or a repeat of one or more of (i)-(iii). In some embodiments, the spacer comprises the nucleotide sequence of GATAGTTA, or a nucleotide sequence having at least one, two, or three modifications, but no more than four modifications of GATAGTTA.

[0611] In some embodiments, the encoded miR binding site is complementary (e.g., fully complementary or partially complementary) to a miR expressed in a DRG (dorsal root ganglion) neuron, e.g., a miR183, a miR182, and/or miR96 binding site. In some embodiments, the encoded miR binding site is complementary (e.g., fully complementary or partially complementary) to a miR expressed in expressed in a DRG neuron. In some embodiments, the encoded miR binding site comprises a nucleotide sequence disclosed, e.g., in WO2020/132455, the contents of which are incorporated by reference herein in its entirety.

[0612] In some embodiments, the encoded miR binding site or encoded miR binding site series comprises a miR183 binding site sequence. In some embodiments, the encoded miR183 binding site comprises the nucleotide sequence of AGTGAATTCTACCAGTGCCATA (SEQ ID NO: 1847), or a nucleotide sequence having at least 50%, 55%, 60%, 65%, 70%, 75%, 80%, 85%, 90%, at least 95%, at least 99%, or 100% sequence identity, or having at least one, two, three, four, five, six, or seven modifications but no more than ten modifications to SEQ ID NO: 1847, e.g., wherein the modification can result in a mismatch between the encoded miR binding site and the corresponding miRNA. In some embodiments, the sequence complementary (e.g., fully complementary or partially complementary) to the seed sequence corresponds to the double underlined of the encoded miR-183 binding site sequence. In some embodiments, the viral genome comprises at least comprises at least 3, 4, or 5 copies (e.g., 4 copies) of the encoded miR183 binding site, e.g. an encoded miR183 binding site. In some embodiments, the viral genome comprises at least comprises 4 copies of the encoded miR183 binding site, e.g. an encoded miR183 binding site comprising 4 copies of a miR183 binding site. In some embodiments, the at least 3, 4, or 5 copies (e.g., 4 copies) of the encoded miR183 binding site are continuous (e.g., not separated by a spacer) or separated by a spacer. In some embodiments, the spacer is about 1 to 6 nucleotides or about 5 to 10 nucleotides, e.g., about 7-8 nucleotides or about 8 nucleotides, in length. In some embodiments, the spacer comprises the nucleotide sequence of GATAGTTA, or a nucleotide sequence having at least one, two, or three modifications, but no more than four modifications of GATAGTTA. In some embodiments, the encoded miR183 binding site series comprises the nucleotide sequence of SEQ ID NO: 1849, or a nucleotide sequence having at least 50%, 55%, 60%, 65%, 70%, 75%, 80%, 85%, 90%, at least 95%, at least 99%, or 100% sequence identity, or having at least one, two, three, four, five, six, or seven modifications but no more than ten modifications to SEQ ID NO: 1849.

[0613] In some embodiments, the encoded miR binding site or encoded miR binding site series comprises a miR182 binding site sequence. In some embodiments, the encoded miR182 binding site comprises, the nucleotide sequence of AGTGTGAGTTCTACCATTGCCAAA (SEQ ID NO: 1867), a nucleotide sequence having at least 50%, 55%, 60%, 65%, 70%, 75%, 80%, 85%, 90%, at least 95%, at least 99%, or 100% sequence identity, or having at least one, two, three, four, five, six, or seven modifications but no more than ten modifications to SEQ ID NO: 1867, e.g., wherein the modification can result in a mismatch between the encoded miR binding site and the corresponding miRNA. In some embodiments, the viral genome comprises at least 3, 4, or 5 copies of the encoded miR182 binding site, e.g., an encoded miR182 binding site series. In some embodiments, the at least 3, 4, or 5 copies (e.g., 4 copies) of the encoded miR182 binding site are continuous (e.g., not separated by a spacer) or separated by a spacer. In some embodiments, the spacer is about 1 to 6 nucleotides or about 5 to 10 nucleotides, e.g., about 7-8 nucleotides or about 8 nucleotides, in length. In some embodiments, the spacer comprises the nucleotide sequence of GATAGTTA, or a nucleotide sequence having at least one, two, or three modifications, but no more than four modifications of GATAGTTA.

[0614] In some embodiments, the encoded miR binding site or encoded miR binding site series comprises a miR96 binding site sequence. In some embodiments, the encoded miR96 binding site comprises the nucleotide sequence of AGCAAAAATGTGCTAGTGCCAAA (SEQ ID NO: 1868), a sequence having at least 50%, 55%, 60%, 65%, 70%, 75%, 80%, 85%, 90%, at least 95%, at least 99%, or 100% sequence identity, or having at least one, two, three, four, five, six, or seven modifications but no more than ten modifications to SEQ ID NO: 1868, e.g., wherein the modification can result in a mismatch between the encoded miR binding site and the corresponding miRNA. In some embodiments, the viral genome comprises at least 3, 4, or 5 copies of the encoded miR96 binding site, e.g., an encoded miR96 binding site series. In some embodiments, the at least 3, 4, or 5 copies (e.g., 4 copies) of the encoded miR96 binding site are continuous (e.g., not separated by a spacer) or separated by a spacer. In some embodiments, the spacer is about 1 to 6 nucleotides or about 5 to 10 nucleotides, e.g., about 7-8 nucleotides or about 8 nucleotides, in length. In some embodiments, the spacer comprises the nucleotide sequence of GATAGTTA, or a nucleotide sequence having at least one, two, or three modifications, but no more than four modifications of GATAGTTA.

[0615] In some embodiments, the encoded miR binding site series comprises a miR122 binding site, a miR142 binding site, a miR183 binding site, a miR182 binding site, a miR 96 binding site, or a combination thereof. In some embodiments, the encoded miR binding site series comprises at least 3, 4, or 5 copies of a miR122 binding site, a miR-1, a miR142 binding site, a miR183 binding site, a miR182 binding site, a miR 96 binding site, or a combination thereof. In some embodiments, at least two of the encoded miR binding sites are connected directly, e.g., without a spacer. In other embodiments, at least two of the encoded miR binding sites are separated by a spacer, e.g., 1, 2, 3, 4, 5, 6, 7, 8, 9, or 10 nucleotides in length, which is located between two or more consecutive encoded miR binding site sequences. In embodiments, the spacer is at least about 5 to 10 nucleotides, e.g., about 7-8 nucleotides or about 8 nucleotides, in length. In some embodiments, the spacer sequence comprises one or more of (i) GGAT; (ii) CACGTG; (iii) GCATGC, or a repeat of one or more of (i)-(iii). In some embodiments, the spacer comprises the nucleotide sequence of GATAGTTA, or a nucleotide sequence having at least one, two, or three modifications, but no more than four modifications of GATAGTTA.

[0616] In some embodiments, an encoded miR binding site series comprises at least 3-5 copies (e.g., 4 copies) of a combination of at least two, three, four, five, or all of a miR122 binding site, a miR-1 a miR142 binding site, a miR183 binding site, a miR182 binding site, a miR96 binding site, wherein each of the miR binding sites within the series are continuous (e.g., not separated by a spacer) or separated by a spacer. In some embodiments, the spacer is about 1 to 6 nucleotides or about 5 to 10 nucleotides, e.g., about 7-8 nucleotides or about 8 nucleotides, in length. In some embodiments, the spacer sequence comprises one or more of (i) GGAT; (ii) CACGTG; (iii) GCATGC, or a repeat of one or more of (i)-(iii). In some embodiments, the spacer comprises the nucleotide sequence of GATAGTTA, or a nucleotide sequence having at least one, two, or three modifications, but no more than four modifications of GATAGTTA.

### Viral Genome Component: Filler Sequence

[0617] In some embodiments, the viral genome of an AAV particle described herein comprises an element to improve packaging efficiency and expression, such as a filler or stuffer sequence. Non-limiting examples of filler or stuffer sequences include albumin and/or alpha-1 antitrypsin. Any known viral, mammalian, or plant sequence may be manipulated for use as a filler sequence. In some embodiments, the filler sequence may be from about 100-3500 nucleotides in length. The stuffer sequence may have a length of about 100, 200, 300, 400, 500, 600, 700, 800, 900, 1000, 1100, 1200, 1300, 1400, 1500, 1600, 1700, 1800, 1900, 2000, 2100, 2200, 2300, 2400, 2500, 2600, 2700, 2800, 2900, or 3000 nucleotides.

### Viral Genome Component: Polyadenylation Sequence

[0618] The viral genome comprises a polyadenylation (polyA) sequence. In some embodiments, the viral genome of the AAV particle (e.g., an AAV particle comprising an AAV capsid variant, described herein) comprises a polyadenylation sequence between the 3′ end of the nucleotide sequence encoding the payload and the 5′ end of the 3′ITR. In some embodiments, the polyA sequence comprises the nucleotide sequence of SEQ ID NO: 4476, or a nucleotide sequence at least 70%, 75%, 80%, 85%, 90%, 92%, 95%, 96%, 97%, 98%, or 99% identical thereto.

### Payloads

[0619] In some embodiments, an AAV particle, e.g., an AAV particle for the vectorized delivery of a siRNA, e.g., a MAPT targeting siRNA described herein, comprises a payload. In some embodiments, an AAV particle, e.g., an AAV particle for the vectorized delivery of a siRNA described herein (e.g., a MAPT targeting siRNA), comprises a viral genome encoding a payload. In some embodiments, the viral genome comprises a promoter operably linked to a nucleic acid comprising a transgene encoding a payload. In some embodiments, the payload comprises a siRNA or a modulatory polynucleotide comprising or encoding an siRNA duplex.

[0620] In some aspects, the present disclosure relates to a composition containing or comprising a nucleic acid sequence encoding a MAPT targeting siRNA or functional fragment or variants thereof and methods of administering the composition in vitro or in vivo in a subject, e.g., a humans and/or an animal model of disease, e.g., a disease related to expression of MAPT.

[0621] AAV particles of the present disclosure may comprise a nucleic acid sequence encoding at least one payload. As used herein, payload or payload region refers to one or more polynucleotides or polynucleotide regions encoded by or within a viral genome or an expression product of such polynucleotide or polynucleotide region, e.g., a transgene encoding a siRNA duplex, a modulatory polynucleotide, or a gene editing system for inhibiting expression of MAPT, or fragment or variant thereof. The payload may comprise any nucleic acid known in the art that is useful for the expression (by supplementation of the MAPT siRNA or gene replacement using a modulatory nucleic acid) of the MAPT targeting siRNA in a target cell transduced or contacted with the AAV particle carrying the payload.

### MAPT

[0622] AAV particle viral genomes of the present disclosure may comprise a payload region, which when expressed, results in the silencing, suppression, and/or reduction of the MAPT gene expression, corresponding transcript expression, and/or protein production.

[0623] The present disclosure provides small interfering RNA (siRNA) duplexes (and modulatory polynucleotides comprising or encoding them) that target MAPT transcript to modulate, e.g., inhibit or silence MAPT gene expression, mRNA production, and/or protein production. In some embodiments, the MAPT gene is a wild type gene. In some embodiments, the MAPT gene comprises at least one, e.g., one or more mutations, e.g., a mutated MAPT gene. In some embodiments, the MAPT gene to be targeted by a siRNA duplex as described herein comprises a mutation that results in the production of a tau protein comprising one, two, or all of a mutation at position 272, 301, and/or 406, e.g., G272V, P301L, and/or R406W.

[0624] In some embodiments, the MAPT gene to be targeted by a siRNA described herein is provided in Table 3. In some embodiments, a siRNA for targeting MAPT described herein targets a MAPT gene comprising a nucleotide sequence provided in Table 3 or a fragment or variant thereof (e.g., the nucleotide sequence of any one of SEQ ID NOs: 3944-3951 or a nucleotide sequence at least 70%, 75%, 80%, 85%, 90%, 95%, 97%, or 99% identical thereto). In some embodiments, the siRNA for targeting MAPT as described herein modulates the level of a protein comprising the amino acid sequence of any one of SEQ ID Nos. 3936-3943, or a fragment or variant thereof (e.g., an amino acid sequence at least 70%, 75%, 80%, 85%, 90%, 95%, 97%, or 99% identical to SEQ ID NOs: 3936-3943).

TABLE 3
Exemplary MAPT Sequences

| | | | SEQ |
|---|---|---|---|
| ID | Sequence | Type | ID NO |
| MAPT SEQ-001 | NP_058519.3 | PRT | 3936 |
| MAPT SEQ-002 | NP_005901.2 | PRT | 3937 |
| MAPT SEQ-003 | NP_058518.1 | PRT | 3938 |
| MAPT SEQ-004 | NP_058525.1 | PRT | 3939 |
| MAPT SEQ-005 | NP_001116539.1 | PRT | 3940 |
| MAPT SEQ-006 | NP_001116538.2 | PRT | 3941 |
| MAPT SEQ-007 | NP_001190180.1 | PRT | 3942 |
| MAPT SEQ-008 | NP_001190181.1 | PRT | 3943 |
| MAPT SEQ-009 | NM_016835.4 | DNA | 3944 |
| MAPT SEQ-010 | NM_005910.5 | DNA | 3945 |
| MAPT SEQ-011 | NM_016834.4 | DNA | 3946 |
| MAPT SEQ-012 | NM_016841.4 | DNA | 3947 |
| MAPT SEQ-013 | NM_001123067.3 | DNA | 3948 |
| MAPT SEQ-014 | NM_001123066.3 | DNA | 3949 |
| MAPT SEQ-015 | NM_001203251.1 | DNA | 3950 |
| MAPT SEQ-016 | NM_001203252.1 | DNA | 3951 |
| MAPT SEQ-017 | NM_001123066.4 | DNA | 5024 |

### Modulatory Polynucleotides

[0625] In some embodiments, modulatory polynucleotides, e.g., RNA or DNA molecules, may be used to treat a neurodegenerative disease, e.g., a tauopathy, e.g., Alzheimer's disease (AD) and frontotemporal dementia (FTD). In some embodiments, the tauopathy may be a neurodegenerative disease. In some embodiments, the tauopathy may be a non-neurodegenerative disease without neurodegeneration. In some embodiments, the tauopathy is a familial tauopathy (e.g., genetic) or a sporadic tauopathy (e.g., idiopathic). In some embodiments, a modulatory polynucleotide described herein, e.g., an RNA or DNA molecule, is used to treat epilepsy or Dravet syndrome (DS).

[0626] In some embodiments, the modulatory polynucleotides may comprise a nucleic acid sequence encoding a siRNA molecule. In some embodiments, the modulatory polynucleotides may comprise a nucleic acid sequence encoding at least 1, 2, 3, 4, 5, 6, 7, 8, or 9 siRNA molecules. In some embodiments the modulatory polynucleotide comprises a siRNA molecule, e.g., an siRNA molecule described herein.

siRNA Molecules for Targeting MAPT

[0627] The present disclosure relates to RNA interference (RNAi) agents, e.g., a siRNA, that modulate (e.g., inhibit) expression of MAPT. In some embodiments, an siRNA molecule described herein modulates, reduces and/or silences, e.g., inhibits a MAPT gene, mRNA, and or protein expression. In some embodiments, a siRNA molecule described herein modulates, reduces, and/or silences, e.g., inhibits, MAPT transcript expression, gene expression and/or protein production in cortical neurons, thereby ameliorating symptoms of Alzheimer's disease (AD) and/or frontotemporal dementia (FTD). In some embodiments, a siRNA molecule described herein modulates, reduces, and/or silences, e.g., inhibits, MAPT transcript expression, gene expression and/or protein production in interneurons and/or hippocampal neurons, thereby ameliorating symptoms of Dravet syndrome (DS). In some embodiments, the hippocampal neuron is a dentate gyrus granule cell neuron.

[0628] RNAi (also known as post-transcriptional gene silencing (PTGS), quelling, or co-suppression) is a post-transcriptional gene silencing process in which RNA molecules, in a sequence-specific manner, inhibit gene expression, typically by causing the destruction of specific mRNA molecules. The active components of RNAi are short/small double stranded RNAs (dsRNAs), called small interfering RNAs (siRNAs), that typically contain 15-30 nucleotides (e.g., 19 to 25, 19 to 24 or 19-21 nucleotides) and 2 nucleotide 3′ overhangs, and that match the nucleic acid sequence of the target gene. These short RNA species may be naturally produced in vivo by Dicer-mediated cleavage of larger dsRNAs and they are functional in mammalian cells.

[0629] Naturally expressed small RNA molecules, named microRNAs (miRNAs), elicit gene silencing by regulating the expression of mRNAs. The miRNAs-containing RNA Induced Silencing Complex (RISC) targets mRNAs presenting a perfect sequence complementarity with nucleotides 2-7 in the 5′ region of the miRNA which is called the seed region, and other base pairs with its 3′ region. miRNA-mediated downregulation of gene expression may be caused by cleavage of the target mRNAs, translational inhibition of the target mRNAs, or mRNA decay. miRNA targeting sequences are usually located in the 3′-UTR of the target mRNAs. A single miRNA may target more than 100 transcripts from various genes, and one mRNA may be targeted by different miRNAs.

[0630] siRNA duplexes or dsRNA targeting a specific mRNA may be designed and synthesized in vitro and introduced into cells for activating RNAi processes (e.g., as described in Elbashir S M et al., Nature, 2001, 411, 494-498, the contents of which are hereby incorporated by reference in their entirety).

[0631] In vitro synthetized siRNA molecules may be introduced into cells to activate RNAi. An exogenous siRNA duplex, when it is introduced into cells, similar to the endogenous dsRNAs, can be assembled to form the RNA Induced Silencing Complex (RISC), a multiunit complex that interacts with RNA sequences that are complementary to one of the two strands of the siRNA duplex (i.e., the antisense strand). During the process, the sense strand (or passenger strand) of the siRNA is lost from the complex, while the antisense strand (or guide strand) of the siRNA is matched with its complementary RNA. In particular, the targets of siRNA containing RISC complexes are mRNAs presenting a perfect sequence complementarity. Then, siRNA mediated gene silencing occurs by cleaving, releasing and degrading the target.

[0632] The siRNA duplex comprised of a sense strand homologous to the target RNA transcript and an antisense strand that is complementary to the target RNA transcript offers much more advantage in terms of efficiency for target RNA destruction compared to the use of the single strand (ss)-siRNAs (e.g., antisense strand RNA or antisense oligonucleotides). In many cases, it requires higher concentration of the ss-siRNA to achieve the effective gene silencing potency of the corresponding duplex.

[0633] While not wishing to be bound by theory, a vector genome may encode a pri-miRNA or pre-miRNA, which when expressed in the target cells is processed via the cell's endogenous pathway to a miRNA duplex. Once the miRNA duplex unwinds, the guide strand may bind to its complementary mRNA substrate and recruit the RNA-induced silencing complex, which leads to the cleavage of the substrate mRNA. Hence, delivery of an AAV particle comprising a vector genome encoding an RNAi precursor (pre- or pri-miR), enters the processing pathway at a different step than would occur with direct administration of an shRNA or siRNA, for example.

[0634] Any of the foregoing molecules may be encoded by an AAV vector or vector genome.

[0635] In some embodiments, a nucleic acid sequence encoding such siRNA molecules, or a single strand of the siRNA molecules, is inserted into the vector genome of an AAV particle and introduced into cells, specifically neurons, including interneurons, and/or other surrounding cells in the central nervous system.

[0636] According to the present disclosure, siRNA molecules (e.g., siRNA duplexes or encoded dsRNA) that target the MAPT transcript may be designed which can modulate, e.g., suppress, inhibit, or silence MAPT gene expression, mRNA expression and/or protein expression. In some embodiments, the siRNA molecule is able to modulate, e.g., inhibit, expression of a wild type MAPT gene, mRNA, and/or protein. In some embodiments, the siRNA molecule is able to modulate, e.g., inhibit, expression of a MAPT gene, mRNA, and/or protein comprising at least one mutation, e.g., a mutated MAPT gene, mRNA, and/or protein. In some embodiments, the mutation is a mutation associate with a tauopathy, e.g., frontotemporal dementia and parkinsonism linked to chromosome 17 (FTDP-17). In some embodiments, the MAPT is a human MAPT. In some embodiments, the MAPT sequence, e.g., the MAPT sequence targeted by an siRNA described herein, comprises the nucleotide sequence of NM_001123066.4, which comprises the nucleotide sequence of:

(SEQ ID NO: 5024)
GCAGTCACCGCCACCCACCAGCTCCGGCACCAACAGCAGCGCCGCTGCCACCGCCCACCTTCTGCCGCCGCCACCACAGC
CACCTTCTCCTCCTCCGCTGTCCTCTCCCGTCCTCGCCTCTGTCGACTATCAGGTGAACTTTGAACCAGGATGGCTGAGC
CCCGCCAGGAGTTCGAAGTGATGGAAGATCACGCTGGGACGTACGGGTTGGGGGACAGGAAAGATCAGGGGGGCTACACC
ATGCACCAAGACCAAGAGGGTGACACGGACGCTGGCCTGAAAGAATCTCCCCTGCAGACCCCCACTGAGGACGGATCTGA
GGAACCGGGCTCTGAAACCTCTGATGCTAAGAGCACTCCAACAGCGGAAGATGTGACAGCACCCTTAGTGGATGAGGGAG
CTCCCGGCAAGCAGGCTGCCGCGCAGCCCCACACGGAGATCCCAGAAGGAACCACAGCTGAAGAAGCAGGCATTGGAGAC
ACCCCCAGCCTGGAAGACGAAGCTGCTGGTCACGTGACCCAAGAGCCTGAAAGTGGTAAGGTGGTCCAGGAAGGCTTCCT
CCGAGAGCCAGGCCCCCCAGGTCTGAGCCACCAGCTCATGTCCGGCATGCCTGGGGCTCCCCTCCTGCCTGAGGGCCCCA
GAGAGGCCACACGCCAACCTTCGGGGACAGGACCTGAGGACACAGAGGGCGGCCGCCACGCCCCTGAGCTGCTCAAGCAC
CAGCTTCTAGGAGACCTGCACCAGGAGGGGCCGCCGCTGAAGGGGGCAGGGGGCAAAGAGAGGCCGGGGAGCAAGGAGGA
GGTGGATGAAGACCGCGACGTCGATGAGTCCTCCCCCCAAGACTCCCCTCCCTCCAAGGCCTCCCCAGCCCAAGATGGGC
GGCCTCCCCAGACAGCCGCCAGAGAAGCCACCAGCATCCCAGGCTTCCCAGCGGAGGGTGCCATCCCCCTCCCTGTGGAT
TTCCTCTCCAAAGTTTCCACAGAGATCCCAGCCTCAGAGCCCGACGGGCCCAGTGTAGGGCGGGCCAAAGGGCAGGATGC
CCCCCTGGAGTTCACGTTTCACGTGGAAATCACACCCAACGTGCAGAAGGAGCAGGCGCACTCGGAGGAGCATTTGGGAA
GGGCTGCATTTCCAGGGGCCCCTGGAGAGGGGCCAGAGGCCCGGGGCCCCTCTTTGGGAGAGGACACAAAAGAGGCTGAC
CTTCCAGAGCCCTCTGAAAAGCAGCCTGCTGCTGCTCCGCGGGGGAAGCCCGTCAGCCGGGTCCCTCAACTCAAAGCTCG
CATGGTCAGTAAAAGCAAAGACGGGACTGGAAGCGATGACAAAAAAGCCAAGACATCCACACGTTCCTCTGCTAAAACCT
TGAAAAATAGGCCTTGCCTTAGCCCCAAACACCCCACTCCTGGTAGCTCAGACCCTCTGATCCAACCCTCCAGCCCTGCT
GTGTGCCCAGAGCCACCTTCCTCTCCTAAATACGTCTCTTCTGTCACTTCCCGAACTGGCAGTTCTGGAGCAAAGGAGAT
GAAACTCAAGGGGGCTGATGGTAAAACGAAGATCGCCACACCGCGGGGAGCAGCCCCTCCAGGCCAGAAGGGCCAGGCCA
ACGCCACCAGGATTCCAGCAAAAACCCCGCCCGCTCCAAAGACACCACCCAGCTCTGCGACTAAGCAAGTCCAGAGAAGA
CCACCCCCTGCAGGGCCCAGATCTGAGAGAGGTGAACCTCCAAAATCAGGGGATCGCAGCGGCTACAGCAGCCCCGGCTC
CCCAGGCACTCCCGGCAGCCGCTCCCGCACCCCGTCCCTTCCAACCCCACCCACCCGGGAGCCCAAGAAGGTGGCAGTGG
TCCGTACTCCACCCAAGTCGCCGTCTTCCGCCAAGAGCCGCCTGCAGACAGCCCCCGTGCCCATGCCAGACCTGAAGAAT
GTCAAGTCCAAGATCGGCTCCACTGAGAACCTGAAGCACCAGCCGGGAGGCGGGAAGGTGCAGATAATTAATAAGAAGCT
GGATCTTAGCAACGTCCAGTCCAAGTGTGGCTCAAAGGATAATATCAAACACGTCCCGGGAGGCGGCAGTGTGCAAATAG
TCTACAAACCAGTTGACCTGAGCAAGGTGACCTCCAAGTGTGGCTCATTAGGCAACATCCATCATAAACCAGGAGGTGGC
CAGGTGGAAGTAAAATCTGAGAAGCTTGACTTCAAGGACAGAGTCCAGTCGAAGATTGGGTCCCTGGACAATATCACCCA
CGTCCCTGGCGGAGGAAATAAAAAGATTGAAACCCACAAGCTGACCTTCCGCGAGAACGCCAAAGCCAAGACAGACCACG
GGGCGGAGATCGTGTACAAGTCGCCAGTGGTGTCTGGGGACACGTCTCCACGGCATCTCAGCAATGTCTCCTCCACCGGC
AGCATCGACATGGTAGACTCGCCCCAGCTCGCCACGCTAGCTGACGAGGTGTCTGCCTCCCTGGCCAAGCAGGGTTTGTG
ATCAGGCCCCTGGGGCGGTCAATAATTGTGGAGAGGAGAGAATGAGAGAGTGTGGAAAAAAAAAGAATAATGACCCGGCC
CCCGCCCTCTGCCCCCAGCTGCTCCTCGCAGTTCGGTTAATTGGTTAATCACTTAACCTGCTTTTGTCACTCGGCTTTGG
CTCGGGACTTCAAAATCAGTGATGGGAGTAAGAGCAAATTTCATCTTTCCAAATTGATGGGTGGGCTAGTAATAAAATAT
TTAAAAAAAAACATTCAAAAACATGGCCACATCCAACATTTCCTCAGGCAATTCCTTTTGATTCTTTTTTCTTCCCCCTC
CATGTAGAAGAGGGAGAAGGAGAGGCTCTGAAAGCTGCTTCTGGGGGATTTCAAGGGACTGGGGGTGCCAACCACCTCTG
GCCCTGTTGTGGGGGTGTCACAGAGGCAGTGGCAGCAACAAAGGATTTGAAACTTGGTGTGTTCGTGGAGCCACAGGCAG
ACGATGTCAACCTTGTGTGAGTGTGACGGGGGTTGGGGTGGGGGGGGAGGCCACGGGGGAGGCCGAGGCAGGGGCTGGGC
AGAGGGGAGAGGAAGCACAAGAAGTGGGAGTGGGAGAGGAAGCCACGTGCTGGAGAGTAGACATCCCCCTCCTTGCCGCT
GGGAGAGCCAAGGCCTATGCCACCTGCAGCGTCTGAGCGGCCGCCTGTCCTTGGTGGCCGGGGGTGGGGGCCTGCTGTGG
GTCAGTGTGCCACCCTCTGCAGGGCAGCCTGTGGGAGAAGGGACAGCGGGTAAAAAGAGAAGGCAAGCTGGCAGGAGGGT
GGCACTTCGTGGATGACCTCCTTAGAAAAGACTGACCTTGATGTCTTGAGAGCGCTGGCCTCTTCCTCCCTCCCTGCAGG
GTAGGGGGCCTGAGTTGAGGGGCTTCCCTCTGCTCCACAGAAACCCTGTTTTATTGAGTTCTGAAGGTTGGAACTGCTGC
CATGATTTTGGCCACTTTGCAGACCTGGGACTTTAGGGCTAACCAGTTCTCTTTGTAAGGACTTGTGCCTCTTGGGAGAC
GTCCACCCGTTTCCAAGCCTGGGCCACTGGCATCTCTGGAGTGTGTGGGGGTCTGGGAGGCAGGTCCCGAGCCCCCTGTC
CTTCCCACGGCCACTGCAGTCACCCCGTCTGCGCCGCTGTGCTGTTGTCTGCCGTGAGAGCCCAATCACTGCCTATACCC
CTCATCACACGTCACAATGTCCCGAATTCCCAGCCTCACCACCCCTTCTCAGTAATGACCCTGGTTGGTTGCAGGAGGTA
CCTACTCCATACTGAGGGTGAAATTAAGGGAAGGCAAAGTCCAGGCACAAGAGTGGGACCCCAGCCTCTCACTCTCAGTT
CCACTCATCCAACTGGGACCCTCACCACGAATCTCATGATCTGATTCGGTTCCCTGTCTCCTCCTCCCGTCACAGATGTG
AGCCAGGGCACTGCTCAGCTGTGACCCTAGGTGTTTCTGCCTTGTTGACATGGAGAGAGCCCTTTCCCCTGAGAAGGCCT
GGCCCCTTCCTGTGCTGAGCCCACAGCAGCAGGCTGGGTGTCTTGGTTGTCAGTGGTGGCACCAGGATGGAAGGGCAAGG
CACCCAGGGCAGGCCCACAGTCCCGCTGTCCCCCACTTGCACCCTAGCTTGTAGCTGCCAACCTCCCAGACAGCCCAGCC
CGCTGCTCAGCTCCACATGCATAGTATCAGCCCTCCACACCCGACAAAGGGGAACACACCCCCTTGGAAATGGTTCTTTT
CCCCCAGTCCCAGCTGGAAGCCATGCTGTCTGTTCTGCTGGAGCAGCTGAACATATACATAGATGTTGCCCTGCCCTCCC
CATCTGCACCCTGTTGAGTTGTAGTTGGATTTGTCTGTTTATGCTTGGATTCACCAGAGTGACTATGATAGTGAAAAGAA
AAAAAAAAAAAAAAAAGGACGCATGTATCTTGAAATGCTTGTAAAGAGGTTTCTAACCCACCCTCACGAGGTGTCTCTCA
CCCCCACACTGGGACTCGTGTGGCCTGTGTGGTGCCACCCTGCTGGGGCCTCCCAAGTTTTGAAAGGCTTTCCTCAGCAC
CTGGGACCCAACAGAGACCAGCTTCTAGCAGCTAAGGAGGCCGTTCAGCTGTGACGAAGGCCTGAAGCACAGGATTAGGA
CTGAAGCGATGATGTCCCCTTCCCTACTTCCCCTTGGGGCTCCCTGTGTCAGGGCACAGACTAGGTCTTGTGGCTGGTCT
GGCTTGCGGCGCGAGGATGGTTCTCTCTGGTCATAGCCCGAAGTCTCATGGCAGTCCCAAAGGAGGCTTACAACTCCTGC
ATCACAAGAAAAAGGAAGCCACTGCCAGCTGGGGGGATCTGCAGCTCCCAGAAGCTCCGTGAGCCTCAGCCACCCCTCAG
ACTGGGTTCCTCTCCAAGCTCGCCCTCTGGAGGGGCAGCGCAGCCTCCCACCAAGGGCCCTGCGACCACAGCAGGGATTG
GGATGAATTGCCTGTCCTGGATCTGCTCTAGAGGCCCAAGCTGCCTGCCTGAGGAAGGATGACTTGACAAGTCAGGAGAC
ACTGTTCCCAAAGCCTTGACCAGAGCACCTCAGCCCGCTGACCTTGCACAAACTCCATCTGCTGCCATGAGAAAAGGGAA
GCCGCCTTTGCAAAACATTGCTGCCTAAAGAAACTCAGCAGCCTCAGGCCCAATTCTGCCACTTCTGGTTTGGGTACAGT
TAAAGGCAACCCTGAGGGACTTGGCAGTAGAAATCCAGGGCCTCCCCTGGGGCTGGCAGCTTCGTGTGCAGCTAGAGCTT
TACCTGAAAGGAAGTCTCTGGGCCCAGAACTCTCCACCAAGAGCCTCCCTGCCGTTCGCTGAGTCCCAGCAATTCTCCTA
AGTTGAAGGGATCTGAGAAGGAGAAGGAAATGTGGGGTAGATTTGGTGGTGGTTAGAGATATGCCCCCCTCATTACTGCC
AACAGTTTCGGCTGCATTTCTTCACGCACCTCGGTTCCTCTTCCTGAAGTTCTTGTGCCCTGCTCTTCAGCACCATGGGC
CTTCTTATACGGAAGGCTCTGGGATCTCCCCCTTGTGGGGCAGGCTCTTGGGGCCAGCCTAAGATCATGGTTTAGGGTGA
TCAGTGCTGGCAGATAAATTGAAAAGGCACGCTGGCTTGTGATCTTAAATGAGGACAATCCCCCCAGGGCTGGGCACTCC
TCCCCTCCCCTCACTTCTCCCACCTGCAGAGCCAGTGTCCTTGGGTGGGCTAGATAGGATATACTGTATGCCGGCTCCTT
CAAGCTGCTGACTCACTTTATCAATAGTTCCATTTAAATTGACTTCAGTGGTGAGACTGTATCCTGTTTGCTATTGCTTG
TTGTGCTATGGGGGGAGGGGGGAGGAATGTGTAAGATAGTTAACATGGGCAAAGGGAGATCTTGGGGTGCAGCACTTAAA
CTGCCTCGTAACCCTTTTCATGATTTCAACCACATTTGCTAGAGGGAGGGAGCAGCCACGGAGTTAGAGGCCCTTGGGGT
TTCTCTTTTCCACTGACAGGCTTTCCCAGGCAGCTGGCTAGTTCATTCCCTCCCCAGCCAGGTGCAGGCGTAGGAATATG
GACATCTGGTTGCTTTGGCCTGCTGCCCTCTTTCAGGGGTCCTAAGCCCACAATCATGCCTCCCTAAGACCTTGGCATCC
TTCCCTCTAAGCCGTTGGCACCTCTGTGCCACCTCTCACACTGGCTCCAGACACACAGCCTGTGCTTTTGGAGCTGAGAT
CACTCGCTTCACCCTCCTCATCTTTGTTCTCCAAGTAAAGCCACGAGGTCGGGGCGAGGGCAGAGGTGATCACCTGCGTG
TCCCATCTACAGACCTGCAGCTTCATAAAACTTCTGATTTCTCTTCAGCTTTGAAAAGGGTTACCCTGGGCACTGGCCTA
GAGCCTCACCTCCTAATAGACTTAGCCCCATGAGTTTGCCATGTTGAGCAGGACTATTTCTGGCACTTGCAAGTCCCATG
ATTTCTTCGGTAATTCTGAGGGTGGGGGGAGGGACATGAAATCATCTTAGCTTAGCTTTCTGTCTGTGAATGTCTATATA
GTGTATTGTGTGTTTTAACAAATGATTTACACTGACTGTTGCTGTAAAAGTGAATTTGGAAATAAAGTTATTACTCTGAT
TAAA.

[0637] In some embodiments, an siRNA molecule of the present disclosure comprises a sense strand and a complementary antisense strand in which both strands are hybridized together to form a duplex structure. The antisense strand may have sufficient complementarity to the MAPT transcript sequence to direct target-specific RNAi to the target mRNA, e.g., the siRNA molecule has a sequence sufficient to trigger the destruction of the target transcript by the RNAi machinery or process.

[0638] In some embodiments, an siRNA molecule of the present disclosure comprises a sense strand and a corresponding antisense strand. In some embodiments, the antisense strand is complementary, e.g., substantially complementary or fully complementary to at least a portion of a MAPT gene, e.g., a MAPT gene as described in Table 3 or 19, or a variant thereof (e.g., a human MAPT). In some embodiments, the antisense strand is complementary, e.g., partially complementary or fully complementary, to a region of the MAPT transcript, e.g., a region between nucleotide 1 and 6850 on the MAPT transcript sequence, e.g., as described in Table 19. As a non-limiting example, the region of complementary comprises nucleotides 1-50, 50-100, 100-150, 150-200, 200-250, 250-300, 300-350, 350-400, 400-450, 450-500, 500-550, 550-600, 600-650, 650-700, 700-750, 750-800, 800-850, 850-900, 900-950, 950-1000, 1000-1050, 1050-1100, 1100-1150, 1150-1200, 1200-1250, 1250-1300, 1300-1350, 1350-1400, 1400-1450, 1450-1500, 1500-1550, 1550-1600, 1600-1650, 1650-1700, 1700-1750, 1750-1800, 1800-1850, 1850-1900, 1900-1950, 1950-2000, 2000-2050, 2050-2100, 2100-2150, 2150-2200, 2200-2250, 2250-2300, 2300-2350, 2350-2400, 2400-2450, 2450-2500, 2500-2550, 2550-2600, 2600-2650, 2650-2700, 2700-2750, 2750-2800, 2800-2850, 2850-2900, 2900-2950, 2950-3000, 3000-3050, 3050-3100, 3100-3150, 3150-3200, 3200-3250, 3250-3300, 3300-3350, 3350-3400, 3400-3450, 3450-3500, 3500-3550, 3550-3600, 3600-3650, 3650-3700, 3700-3750, 3750-3800, 3800-3850, 3850-3900, 3900-3950, 3950-4000, 4000-4050, 4050-4100, 4100-4150, 4150-4200, 4200-4250, 4250-4300, 4300-4350, 4350-4400, 4400-4450, 4450-4500, 4500-4550, 4550-4600, 4600-4650, 4650-4700, 4700-4750, 4750-4800, 4800-4850, 4850-4900, 4900-4950, 4950-5000, 5000-5050, 5050-5100, 5100-5150, 5150-5200, 5200-5250, 5250-5300, 5300-5350, 5350-5400, 5400-5450, 5450-5500, 5500-5550, 5550-5600, 5600-5650, 5650-5700, 5700-5750, 5750-5800, 5800-5850, 5850-5900, 5900-5950, 5950-6000, 6000-6050, 6050-6100, 6100-6150, 6150-6200, 6200-6250, 6250-6300, 6300-6350, 6350-6400, 6400-6450, 6450-6500, 6500-6550, 6550-6600, 6600-6650, 6650-6700, 6700-6750, 6750-6800, or 6800-6850 of the MAPT transcript sequence, e.g., as described in Table 3 or 19, e.g., SEQ ID NO: 5024.

[0639] In some embodiments, the antisense strand sequence comprises a region of complementarity to the target sequence (e.g., a MAPT target), which is 15-30, 19-21, or 25-30 nucleotides in length, e.g., 15, 16, 17, 18, 19, 20, 21, 22, 23, 24, 25, 26, 27, 28, 29, or 30 nucleotides in length. In some embodiments, the antisense strand sequence is fully complementary to the target sequence (e.g., 100% complementary). In some embodiments, the antisense strand sequence is substantially complementary to the target sequence. In some embodiments, the antisense strand sequence comprises a region of complementarity to a portion of a the target sequence (e.g., a MAPT sequence provided in Table 3 or 19 or a variant thereof), e.g., a portion of at least 15, 16, 17, 18, 19, 20, or 21 contiguous nucleotides that comprises one, two, or three mismatches relative to the target sequence. In some embodiments, the antisense strand sequence is complementary to at least 15, 16, 17, or 18, contiguous nucleotides with 0, 1, 2, or 3 mismatches to nucleotides 1300-1317, 1305-1322, 1860-1877, 2279-2297, 2286-2303, 2402-2419, 2581-2958, 2584-2601, 2633-2650, or 2634-2653 of SEQ ID NO: 5024. In some embodiments, the antisense strand sequence is complementary to at least 15, 16, 17, 18, 19, 20, or 21, contiguous nucleotides with 0, 1, 2, or 3 mismatches to a portion of the target sequence present in an exon (e.g., an exon comprising nucleotides 1277 to 1332 of SEQ ID NO: 5024, an exon comprising nucleotides 1712-1977 of SEQ ID NO: 5024, or an exon comprising nucleotides 2266-6644 of SEQ ID NO: 5024) of a coding sequence of a MAPT mRNA, e.g., a MAPT sequence of SEQ ID NO: 5024, e.g., a coding sequence comprising nucleotides 151 to 2481 of SEQ ID NO: 5024.

[0640] In some embodiments, the sense strand sequence comprises at least 15, 16, 17, 18, 19, 20, or 21 contiguous nucleotides with 0, 1, 2, or 3 mismatches of the corresponding portion of a MAPT sequence, e.g., a MAPT sequence provided in Table 3 or 19, or a variant thereof. In some embodiments, the sense strand sequence or a portion thereof corresponds to positions 1300-1317, 1305-1322, 1860-1877, 2279-2297, 2286-2303, 2402-2419, 2581-2958, 2584-2601, 2633-2650, or 2634-2653 of SEQ ID NO: 5024. In some embodiments, the sense strand sequence comprises a nucleotide sequence comprising at least 15, 16, 17, 18, 19, 20, or 21, contiguous nucleotides with 0, 1, 2, or 3 mismatches of the corresponding portion of an exon (e.g., an exon comprising nucleotides 1277 to 1332 of SEQ ID NO: 5024, an exon comprising nucleotides 1712-1977 of SEQ ID NO: 5024, or an exon comprising nucleotides 2266-6644 of SEQ ID NO: 5024) of a coding sequence of a MAPT mRNA, e.g., a MAPT sequence of SEQ ID NO: 5024, e.g., a coding sequence comprising nucleotides 151 to 2481 of SEQ ID NO: 5024. In some embodiments, the sense strand sequence comprises at least 15, 16, 17, or 18 contiguous nucleotides with 0, 1, 2, or 3 mismatches from nucleotides 1300-1317, 1305-1322, 1860-1877, 2279-2297, 2286-2303, 2402-2419, 2581-2958, 2584-2601, 2633-2650, or 2634-2653 of SEQ ID NO: 5024.

[0641] In some embodiments, the sense strand sequence and the antisense strand sequence of an siRNA described herein comprise a region of complementarity, which is 15-30, 19-21, or 25-30 nucleotides in length, e.g., 17, 18, 20, 21, 22, 25, or 30 nucleotides in length. In some embodiments, the sense strand, antisense strand, or both comprise at least 15-30, 19-21, or 25-30 nucleotides in length, e.g., 17, 18, 20, 21, 22, 25, or 30 nucleotides in length. In some embodiments, the sense strand, antisense strand, or both the sense strand comprise one or two nucleotide overhangs, e.g., at the 5′ end of the sense strand and the 3′ end of the antisense strand or at the 5′ end of the antisense strand and the 3′ end of the sense strand. In some embodiments, the sense strand and the antisense strand comprise one mismatch. In some embodiments, the antisense strand sequence comprises one mismatch with the target sequence.

[0642] In some embodiments, the siRNA molecules of the present disclosure can be synthetic RNA duplexes comprising about 19 nucleotides to about 25 nucleotides, and two overhanging nucleotides at the 3′-end. In some aspects, the siRNA molecules may be unmodified RNA molecules. In other aspects, the siRNA molecules may contain at least one modified nucleotide, such as base, sugar or backbone modifications. In some embodiments, the overhanging nucleotides at the 3′-end of each of the sense and the antisense strand is a dTdT overhang. In some embodiments, the sense strand, antisense strand, or both the sense strand and the antisense strand does not comprise a dTdT overhang.

[0643] In some embodiments, the siRNA molecule comprises an antisense (e.g., guide) strand sequence. In some embodiments, the antisense strand sequence comprises at least 15, 16, 17, 18, 19, 20, 21 contiguous nucleotides differing by 3, 2, 1, or 0 nucleotides from any one of the antisense strand sequences provided in Tables 4, 5, 9A, or 9B. In some embodiments, the antisense sequence comprises the nucleotide sequence of any one of the antisense strand sequences provided in Tables 4, 5, 9A, or 9B, or a nucleotide sequence 70%, 80%, 85%, 90%, 95% identical thereto. In some embodiments, the antisense strand sequence comprises at least 15, 16, 17, 18, 19, or more than 19 consecutive nucleotides of a nucleotide sequence of any one of the antisense strand sequences provided in Tables 4, 5, 9A, or 9B. In some embodiments, the antisense sequence comprises nucleotides 1 to 19, 1 to 18, 1 to 17, 1 to 16, 2 to 19, or 2 to 18, 2 to 17 of any one of the antisense strand sequences provided in Tables 4, 5, 9A, or 9B. In some embodiments, the antisense sequence may comprise a dTdT overhang, e.g., at the 3′ end of the antisense strand sequence. In some embodiments, the antisense sequence does not comprise a dTdT overhang, e.g., does not comprise a dTdT overhang at the 3′ end of the sequence. In some embodiments, the antisense strand sequence is a DNA sequence (e.g., comprises T in place of U in any one of the sequences provided in Tables 4 and 5). In some embodiments, the antisense strand sequence is an RNA sequence (e.g., comprises U in place of T in any one of the sequences provided in Table 9A or 9B).

[0644] In some embodiments, the siRNA molecule comprises a sense (e.g., passenger) strand sequence. In some embodiments, the sense strand sequence comprises at least 15, 16, 17, 18, 19, 20, 21 contiguous nucleotides differing by 3, 2, 1, or 0 nucleotides from any one of the sense strand sequences provided in Tables 4, 5, 9A, or 9B. In some embodiments, the sense sequence comprises the nucleotide sequence of any one of the sense strand sequences provided in Tables 4, 5, 9A, or 9B, or a nucleotide sequence 70%, 80%, 85%, 90%, 95% identical thereto. In some embodiments, the sense strand sequence comprises at least 15, 16, 17, 18, 19, or more than 19 consecutive nucleotides of a nucleotide sequence of any one of the sense strand sequences provided in Tables 4, 5, 9A, or 9B. In some embodiments, the sense sequence comprises nucleotides 1 to 19, 1 to 18, 1 to 17, 1 to 162 to 19, or 2 to 18, 2 to 17 of any one of the sense strand sequences provided in Tables 4, 5, 9A, or 9B. In some embodiments, the sense sequence may comprise a dTdT overhang, e.g. at the 3′ end of the sense strand sequence. In some embodiments, the sense sequence does not comprise a dTdT overhang, e.g., does not comprise the dTdT overhang at the 3′ end of the sequence. In some embodiments, the sense strand sequence is a DNA sequence (e.g., comprises T in place of U in any one of the sequences provided in Tables 4 and 5). In some embodiments, the sense strand sequence is an RNA sequence (e.g., comprises U in place of T in any one of the sequences provided in Table 9A or 9B).

[0645] In some embodiments, the siRNA comprises an antisense strand sequence comprising a nucleotide sequence comprising at least 15, 16, 17, 18, 19, 20, or 21 contiguous nucleotides differing by no more than 3, 2, 1, or 0 nucleotides from the antisense strand sequences provided in Tables 4, 5, 9A, or 9B; and a sense strand sequence comprising a nucleotide sequence comprising at least 15, 16, 17, 18, 19, 20, or 21 contiguous nucleotides differing by no more than 3, 2, 1, or 0 nucleotides from the sense strand sequences provided in Tables 4, 5, 9A, or 9B, optionally wherein the sense strand sequence and the antisense strand sequence comprise a region of complementarity of at least 15 nucleotides. In some embodiments, the siRNA molecules of the present disclosure may comprise a siRNA duplex as described in Table 4, 5 9A, or 9B, or a variant, e.g., functional variant, thereof.

[0646] In some embodiments, the dTdT nucleotides of the sense strand and/or the antisense strand of the siRNA provided in Table 4 or herein may be replaced with any two nucleotides (e.g., UU, UC, AA, AG, AC, etc.). Alternatively, the dTdT nucleotides of the sense strand and/or the antisense strand of Table 4 or provided herein may be replaced with a single nucleotide (e.g., U, A, C, or G).

TABLE 4
Exemplary Sense and Antisense Strand Sequences of MAPT dsRNA

| | | Sense | SS | | | AS |
|---|---|---|---|---|---|---|
| siRNA | | Strand | SEQ | | | SEQ |
| Duplex | | Sequence | ID | | Antisense Strand | ID |
| ID | SS ID | (5′-3′) | NO | AS ID | Sequence (5′-3′) | NO |
| D-001 | SS-001 | GCUUUGGCUCGG | 4143 | AS-001 | UGAAGUCCCGAGCC | 3952 |
| | | GACUUCCdTdT | | | AAAGCdTdT | |
| D-002 | SS-002 | CGACAUGGUAG | 4144 | AS-002 | UGGCGAGUCUACCA | 3953 |
| | | ACUCGCCCdTdT | | | UGUCGdTdT | |
| D-003 | SS-003 | CUCCUCGCAGUU | 4145 | AS-003 | UUAACCGAACUGCG | 3954 |
| | | CGGUUACdTdT | | | AGGAGdTdT | |
| D-004 | SS-004 | GGCUUUGGCUCG | 4146 | AS-004 | UAAGUCCCGAGCCA | 3955 |
| | | GGACUUCdTdT | | | AAGCCdTdT | |
| D-005 | SS-005 | GGCUUUGGCUCG | 4147 | AS-004 | UAAGUCCCGAGCCA | 3955 |
| | | GGACUUAdTdT | | | AAGCCdTdT | |
| D-006 | SS-006 | GGCUUUGGCUCG | 4148 | AS-004 | UAAGUCCCGAGCCA | 3955 |
| | | GGACUUUdTdT | | | AAGCCdTdT | |
| D-007 | SS-007 | GGCUUUGGCACG | 4149 | AS-004 | UAAGUCCCGAGCCA | 3955 |
| | | GGACUUCdTdT | | | AAGCCdTdT | |
| D-008 | SS-008 | GGCUUUGGCUCG | 4150 | AS-004 | UAAGUCCCGAGCCA | 3955 |
| | | GGACUUGdTdT | | | AAGCCdTdT | |
| D-009 | SS-009 | GCAUCGACAUGG | 4151 | AS-005 | UAGUCUACCAUGUC | 3956 |
| | | UAGACUCdTdT | | | GAUGCdTdT | |
| D-010 | SS-010 | GCAUCGACAUGG | 4152 | AS-005 | UAGUCUACCAUGUC | 3956 |
| | | UAGACUAdTdT | | | GAUGCdTdT | |
| D-011 | SS-011 | GCAUCGACAUGG | 4153 | AS-005 | UAGUCUACCAUGUC | 3956 |
| | | UAGACUUdTdT | | | GAUGCdTdT | |
| D-012 | SS-012 | GCAUCGACAAGG | 4154 | AS-005 | UAGUCUACCAUGUC | 3956 |
| | | UAGACUCdTdT | | | GAUGCdTdT | |
| D-013 | SS-013 | GCAUCGACAUGG | 4155 | AS-005 | UAGUCUACCAUGUC | 3956 |
| | | UAGACUGdTdT | | | GAUGCdTdT | |
| D-014 | SS-014 | UGCUCCUCGCAG | 4156 | AS-006 | UACCGAACUGCGAG | 3957 |
| | | UUCGGUCdTdT | | | GAGCAdTdT | |
| D-015 | SS-015 | CACCCAAGUCGC | 4157 | AS-007 | UAAGACGGCGACUU | 3958 |
| | | CGUCUUCdTdT | | | GGGUGdTdT | |
| D-016 | SS-016 | CCUCGCAGUUCG | 4158 | AS-008 | UAUUAACCGAACUG | 3959 |
| | | GUUAAUCdTdT | | | CGAGGdTdT | |
| D-017 | SS-017 | UCCUCGCAGUUC | 4159 | AS-009 | UUUAACCGAACUGC | 3960 |
| | | GGUUAACdTdT | | | GAGGAdTdT | |
| D-018 | SS-018 | AGCUGACCUUCC | 4160 | AS-010 | UUCUCGCGGAAGGU | 3961 |
| | | GCGAGACdTdT | | | CAGCUdTdT | |
| D-019 | SS-019 | GACUGGAAGCG | 4161 | AS-011 | UUUGUCAUCGCUUC | 3962 |
| | | AUGACAACdTdT | | | CAGUCdTdT | |
| D-020 | SS-020 | GACUGGAAGCG | 4162 | AS-011 | UUUGUCAUCGCUUC | 3962 |
| | | AUGACAAAdTdT | | | CAGUCdTdT | |
| D-021 | SS-021 | GACUGGAAGCG | 4163 | AS-011 | UUUGUCAUCGCUUC | 3962 |
| | | AUGACAAUdTdT | | | CAGUCdTdT | |
| D-022 | SS-022 | GACUGGAAGGG | 4164 | AS-011 | UUUGUCAUCGCUUC | 3962 |
| | | AUGACAACdTdT | | | CAGUCdTdT | |
| D-023 | SS-023 | GACUGGAAGCG | 4165 | AS-011 | UUUGUCAUCGCUUC | 3962 |
| | | AUGACAAGdTdT | | | CAGUCdTdT | |
| D-024 | SS-024 | AGCUCGCAUGGU | 4166 | AS-012 | UUUACUGACCAUGC | 3963 |
| | | CAGUAACdTdT | | | GAGCUdTdT | |
| D-025 | SS-025 | AGUCUACAAACC | 4167 | AS-013 | UUCAACUGGUUUGU | 3964 |
| | | AGUUGACdTdT | | | AGACUdTdT | |
| D-026 | SS-026 | GCUCCUCGCAGU | 4168 | AS-014 | UAACCGAACUGCGA | 3965 |
| | | UCGGUUCdTdT | | | GGAGCdTdT | |
| D-027 | SS-027 | GCUCCUCGCAGU | 4169 | AS-014 | UAACCGAACUGCGA | 3965 |
| | | UCGGUUGdTdT | | | GGAGCdTdT | |
| D-028 | SS-028 | GCUCCUCGCAGU | 4170 | AS-014 | UAACCGAACUGCGA | 3965 |
| | | UCGGUUUdTdT | | | GGAGCdTdT | |
| D-029 | SS-029 | GCUCCUCGCUGU | 4171 | AS-014 | UAACCGAACUGCGA | 3965 |
| | | UCGGUUCdTdT | | | GGAGCdTdT | |
| D-030 | SS-030 | CUUCCGCGAGAA | 4172 | AS-015 | UUUGGCGUUCUCGC | 3966 |
| | | CGCCAACdTdT | | | GGAAGdTdT | |
| D-031 | SS-031 | CUUCCGCGAGAA | 4173 | AS-015 | UUUGGCGUUCUCGC | 3966 |
| | | CGCCAAAdTdT | | | GGAAGdTdT | |
| D-032 | SS-032 | CUUCCGCGAGAA | 4174 | AS-015 | UUUGGCGUUCUCGC | 3966 |
| | | CGCCAAUdTdT | | | GGAAGdTdT | |
| D-033 | SS-033 | CUUCCGCGACAA | 4175 | AS-015 | UUUGGCGUUCUCGC | 3966 |
| | | CGCCAACdTdT | | | GGAAGdTdT | |
| D-034 | SS-034 | CUUCCGCGAGAA | 4176 | AS-015 | UUUGGCGUUCUCGC | 3966 |
| | | CGCCAAGdTdT | | | GGAAGdTdT | |
| D-035 | SS-035 | AAAUCAGUGAU | 4177 | AS-016 | UUACUCCCAUCACU | 3967 |
| | | GGGAGUACdTdT | | | GAUUUdTdT | |
| D-036 | SS-036 | GUCGCCGUCUUC | 4178 | AS-017 | UUUGGCGGAAGACG | 3968 |
| | | CGCCAACdTdT | | | GCGACdTdT | |
| D-037 | SS-037 | AUGGUAAAACG | 4179 | AS-018 | UCGAUCUUCGUUUU | 3969 |
| | | AAGAUCGCdTdT | | | ACCAUdTdT | |
| D-038 | SS-038 | ACGAAGAUCGCC | 4180 | AS-019 | UCGGUGUGGCGAUC | 3970 |
| | | ACACCGCdTdT | | | UUCGUdTdT | |
| D-039 | SS-039 | CGCAGUUCGGUU | 4181 | AS-020 | UCCAAUUAACCGAA | 3971 |
| | | AAUUGGCdTdT | | | CUGCGdTdT | |
| D-040 | SS-040 | GUACUCCACCCA | 4182 | AS-021 | UGCGACUUGGGUGG | 3972 |
| | | AGUCGCCdTdT | | | AGUACdTdT | |
| D-041 | SS-041 | CUCGGCUUUGGC | 4183 | AS-022 | UUCCCGAGCCAAAG | 3973 |
| | | UCGGGACdTdT | | | CCGAGdTdT | |
| D-042 | SS-042 | GCCCCUGGGGCG | 4184 | AS-023 | UAUUGACCGCCCCA | 3974 |
| | | GUCAAUCdTdT | | | GGGGCdTdT | |
| D-043 | SS-043 | CUCGCAGUUCGG | 4185 | AS-024 | UAAUUAACCGAACU | 3975 |
| | | UUAAUUCdTdT | | | GCGAGdTdT | |
| D-044 | SS-044 | UCGCCGUCUUCC | 4186 | AS-025 | UCUUGGCGGAAGAC | 3976 |
| | | GCCAAGCdTdT | | | GGCGAdTdT | |
| D-045 | SS-045 | GACGGGACUGG | 4187 | AS-026 | UAUCGCUUCCAGUC | 3977 |
| | | AAGCGAUCdTdT | | | CCGUCdTdT | |
| D-046 | SS-046 | UGGUAAAACGA | 4188 | AS-027 | UGCGAUCUUCGUUU | 3978 |
| | | AGAUCGCCdTdT | | | UACCAdTdT | |
| D-047 | SS-047 | GUAAAACGAAG | 4189 | AS-028 | UUGGCGAUCUUCGU | 3979 |
| | | AUCGCCACdTdT | | | UUUACdTdT | |
| D-048 | SS-048 | ACAAUAUCACCC | 4190 | AS-029 | UGGACGUGGGUGAU | 3980 |
| | | ACGUCCCdTdT | | | AUUGUdTdT | |
| D-049 | SS-049 | CCUUCCGCGAGA | 4191 | AS-030 | UUGGCGUUCUCGCG | 3981 |
| | | ACGCCACdTdT | | | GAAGGdTdT | |
| D-050 | SS-050 | GGGGGCUGAUG | 4192 | AS-031 | UGUUUUACCAUCAG | 3982 |
| | | GUAAAACCdTdT | | | CCCCCdTdT | |
| D-051 | SS-051 | GCCGUCUUCCGC | 4193 | AS-032 | UCUCUUGGCGGAAG | 3983 |
| | | CAAGAGCdTdT | | | ACGGCdTdT | |
| D-052 | SS-052 | CACCGGCAGCAU | 4194 | AS-033 | UAUGUCGAUGCUGC | 3984 |
| | | CGACAUCdTdT | | | CGGUGdTdT | |
| D-053 | SS-053 | GUAAAAGCAAA | 4195 | AS-034 | UUCCCGUCUUUGCU | 3985 |
| | | GACGGGACdTdT | | | UUUACdTdT | |
| D-054 | SS-054 | AGGUUUCUAACC | 4196 | AS-035 | UAGGGUGGGUUAGA | 3986 |
| | | CACCCUCdTdT | | | AACCUdTdT | |
| D-055 | SS-055 | UUCCGCGAGAAC | 4197 | AS-036 | UUUUGGCGUUCUCG | 3987 |
| | | GCCAAACdTdT | | | CGGAAdTdT | |
| D-056 | SS-056 | GACCUUCCGCGA | 4198 | AS-037 | UGCGUUCUCGCGGA | 3988 |
| | | GAACGCCdTdT | | | AGGUCdTdT | |
| D-057 | SS-057 | CGCCACGCUAGC | 4199 | AS-038 | UUCGUCAGCUAGCG | 3989 |
| | | UGACGACdTdT | | | UGGCGdTdT | |
| D-058 | SS-058 | ACCUGCGUGUCC | 4200 | AS-039 | UUAGAUGGGACACG | 3990 |
| | | CAUCUACdTdT | | | CAGGUdTdT | |
| D-059 | SS-059 | CCCCAGCUCGCC | 4201 | AS-040 | UUAGCGUGGCGAGC | 3991 |
| | | ACGCUACdTdT | | | UGGGGdTdT | |
| D-060 | SS-060 | GCCGUUCAGCUG | 4202 | AS-041 | UUCGUCACAGCUGA | 3992 |
| | | UGACGACdTdT | | | ACGGCdTdT | |
| D-061 | SS-061 | GCUGAUGGUAA | 4203 | AS-042 | UCUUCGUUUUACCA | 3993 |
| | | AACGAAGCdTdT | | | UCAGCdTdT | |
| D-062 | SS-062 | ACGAGGUGUCUC | 4204 | AS-043 | UGGGUGAGAGACAC | 3994 |
| | | UCACCCCdTdT | | | CUCGUdTdT | |
| D-063 | SS-063 | GGGCCAGCCUAA | 4205 | AS-044 | UAUGAUCUUAGGCU | 3995 |
| | | GAUCAUCdTdT | | | GGCCCdTdT | |
| D-064 | SS-064 | UCUAACCCACCC | 4206 | AS-045 | UUCGUGAGGGUGGG | 3996 |
| | | UCACGACdTdT | | | UUAGAdTdT | |
| D-065 | SS-065 | UAAAGAGGUUU | 4207 | AS-046 | UGGGUUAGAAACCU | 3997 |
| | | CUAACCCCdTdT | | | CUUUAdTdT | |
| D-066 | SS-066 | CUCACCUCCUAA | 4208 | AS-047 | UAGUCUAUUAGGAG | 3998 |
| | | UAGACUCdTdT | | | GUGAGdTdT | |
| D-067 | SS-067 | GGAUAUACUGU | 4209 | AS-048 | UCCGGCAUACAGUA | 3999 |
| | | AUGCCGGCdTdT | | | UAUCCdTdT | |
| D-068 | SS-068 | CACCCUCACGAG | 4210 | AS-049 | UAGACACCUCGUGA | 4000 |
| | | GUGUCUCdTdT | | | GGGUGdTdT | |
| D-069 | SS-069 | CACGCUAGCUGA | 4211 | AS-050 | UACCUCGUCAGCUA | 4001 |
| | | CGAGGUCdTdT | | | GCGUGdTdT | |
| D-070 | SS-070 | UCCCAUGAUUUC | 4212 | AS-051 | UACCGAAGAAAUCA | 4002 |
| | | UUCGGUCdTdT | | | UGGGAdTdT | |
| D-071 | SS-071 | UUGAGUUGUAG | 4213 | AS-052 | UAAUCCAACUACAA | 4003 |
| | | UUGGAUUCdTdT | | | CUCAAdTdT | |
| D-072 | SS-072 | CUGCGUGUCCCA | 4214 | AS-053 | UUGUAGAUGGGACA | 4004 |
| | | UCUACACdTdT | | | CGCAGdTdT | |
| D-073 | SS-073 | GUUGAGUUGUA | 4215 | AS-054 | UAUCCAACUACAAC | 4005 |
| | | GUUGGAUCdTdT | | | UCAACdTdT | |
| D-074 | SS-074 | GGUGGUGGUUA | 4216 | AS-055 | UAUAUCUCUAACCA | 4006 |
| | | GAGAUAUCdTdT | | | CCACCdTdT | |
| D-075 | SS-075 | GGGCUAGAUAG | 4217 | AS-056 | UGUAUAUCCUAUCU | 4007 |
| | | GAUAUACCdTdT | | | AGCCCdTdT | |
| D-076 | SS-076 | AGGAUUCCAGCA | 4218 | AS-057 | UGGUUUUUGCUGGA | 4008 |
| | | AAAACCCdTdT | | | AUCCUdTdT | |
| D-077 | SS-077 | GGCCCCUGGGGC | 4219 | AS-058 | UUUGACCGCCCCAG | 4009 |
| | | GGUCAACdTdT | | | GGGCCdTdT | |
| D-078 | SS-078 | GAUUAGGACUG | 4220 | AS-059 | UAUCGCUUCAGUCC | 4010 |
| | | AAGCGAUCdTdT | | | UAAUCdTdT | |
| D-079 | SS-079 | CUCCCAAGUUUU | 4221 | AS-060 | UCCUUUCAAAACUU | 4011 |
| | | GAAAGGCdTdT | | | GGGAGdTdT | |
| D-080 | SS-080 | GCUGGUCUGGCU | 4222 | AS-061 | UGCCGCAAGCCAGA | 4012 |
| | | UGCGGCCdTdT | | | CCAGCdTdT | |
| D-081 | SS-081 | GUUCCACUCAUC | 4223 | AS-062 | UCAGUUGGAUGAGU | 4013 |
| | | CAACUGCdTdT | | | GGAACdTdT | |
| D-082 | SS-082 | CACCUCCUAAUA | 4224 | AS-063 | UUAAGUCUAUUAGG | 4014 |
| | | GACUUACdTdT | | | AGGUGdTdT | |
| D-083 | SS-083 | UUCUAACCCACC | 4225 | AS-064 | UCGUGAGGGUGGGU | 4015 |
| | | CUCACGCdTdT | | | UAGAAdTdT | |
| D-084 | SS-084 | AAGCCCACAAUC | 4226 | AS-065 | UAGGCAUGAUUGUG | 4016 |
| | | AUGCCUCdTdT | | | GGCUUdTdT | |
| D-085 | SS-085 | ACCUUCCGCGAG | 4227 | AS-066 | UGGCGUUCUCGCGG | 4017 |
| | | AACGCCCdTdT | | | AAGGUdTdT | |
| D-086 | SS-086 | GCUGGUCACGUG | 4228 | AS-067 | UUUGGGUCACGUGA | 4018 |
| | | ACCCAACdTdT | | | CCAGCdTdT | |
| D-087 | SS-087 | UAACCCACCCUC | 4229 | AS-068 | UCCUCGUGAGGGUG | 4019 |
| | | ACGAGGCdTdT | | | GGUUAdTdT | |
| D-088 | SS-088 | CUUACAACUCCU | 4230 | AS-069 | UUGAUGCAGGAGUU | 4020 |
| | | GCAUCACdTdT | | | GUAAGdTdT | |
| D-089 | SS-089 | UGGGACUUUAG | 4231 | AS-070 | UGUUAGCCCUAAAG | 4021 |
| | | GGCUAACCdTdT | | | UCCCAdTdT | |
| D-090 | SS-090 | GCCACAGGCAGA | 4232 | AS-071 | UACAUCGUCUGCCU | 4022 |
| | | CGAUGUCdTdT | | | GUGGCdTdT | |
| D-091 | SS-091 | GCCUCUUGGGAG | 4233 | AS-072 | UGGACGUCUCCCAA | 4023 |
| | | ACGUCCCdTdT | | | GAGGCdTdT | |
| D-092 | SS-092 | GAGAUAUGCCCC | 4234 | AS-073 | UAUGAGGGGGGCAU | 4024 |
| | | CCUCAUCdTdT | | | AUCUCdTdT | |
| D-093 | SS-093 | UCCCAAGUUUUG | 4235 | AS-074 | UGCCUUUCAAAACU | 4025 |
| | | AAAGGCCdTdT | | | UGGGAdTdT | |
| D-094 | SS-094 | AGUUAUUACUC | 4236 | AS-075 | UUUAAUCAGAGUAA | 4026 |
| | | UGAUUAACdTdT | | | UAACUdTdT | |
| D-095 | SS-095 | UAUGCCCCCCUC | 4237 | AS-076 | UAGUAAUGAGGGGG | 4027 |
| | | AUUACUCdTdT | | | GCAUAdTdT | |
| D-096 | SS-096 | CAAAAUCAGGG | 4238 | AS-077 | UUGCGAUCCCCUGA | 4028 |
| | | GAUCGCACdTdT | | | UUUUGdTdT | |
| D-097 | SS-097 | CAGACCACGGGG | 4239 | AS-078 | UUCUCCGCCCCGUG | 4029 |
| | | CGGAGACdTdT | | | GUCUGdTdT | |
| D-098 | SS-098 | CUUGGGUGGGC | 4240 | AS-079 | UCUAUCUAGCCCAC | 4030 |
| | | UAGAUAGCdTdT | | | CCAAGdTdT | |
| D-099 | SS-099 | CUCGCCACGCUA | 4241 | AS-080 | UGUCAGCUAGCGUG | 4031 |
| | | GCUGACCdTdT | | | GCGAGdTdT | |
| D-100 | SS-100 | UGUUGAGUUGU | 4242 | AS-081 | UUCCAACUACAACU | 4032 |
| | | AGUUGGACdTdT | | | CAACAdTdT | |
| D-101 | SS-101 | UAUACAUAGAU | 4243 | AS-082 | UGGGCAACAUCUAU | 4033 |
| | | GUUGCCCCdTdT | | | GUAUAdTdT | |
| D-102 | SS-102 | AACCCACCCUCA | 4244 | AS-083 | UACCUCGUGAGGGU | 4034 |
| | | CGAGGUCdTdT | | | GGGUUdTdT | |
| D-103 | SS-103 | GUUGAGCAGGA | 4245 | AS-084 | UGAAAUAGUCCUGC | 4035 |
| | | CUAUUUCCdTdT | | | UCAACdTdT | |
| D-104 | SS-104 | CCACGCUAGCUG | 4246 | AS-085 | UCCUCGUCAGCUAG | 4036 |
| | | ACGAGGCdTdT | | | CGUGGdTdT | |
| D-105 | SS-105 | CUCCUAAUAGAC | 4247 | AS-086 | UGGCUAAGUCUAUU | 4037 |
| | | UUAGCCCdTdT | | | AGGAGdTdT | |
| D-106 | SS-106 | GAUUUCUUCGG | 4248 | AS-087 | UAGAAUUACCGAAG | 4038 |
| | | UAAUUCUCdTdT | | | AAAUCdTdT | |
| D-107 | SS-107 | GUCCCAAAGGAG | 4249 | AS-088 | UGUAAGCCUCCUUU | 4039 |
| | | GCUUACCdTdT | | | GGGACdTdT | |
| D-108 | SS-108 | GGUGGUUAGAG | 4250 | AS-089 | UGGCAUAUCUCUAA | 4040 |
| | | AUAUGCCCdTdT | | | CCACCdTdT | |
| D-109 | SS-109 | GGCUAGAUAGG | 4251 | AS-090 | UAGUAUAUCCUAUC | 4041 |
| | | AUAUACUCdTdT | | | UAGCCdTdT | |
| D-110 | SS-110 | AUUCACCAGAGU | 4252 | AS-091 | UAUAGUCACUCUGG | 4042 |
| | | GACUAUCdTdT | | | UGAAUdTdT | |
| D-111 | SS-111 | GAUAUACUGUA | 4253 | AS-092 | UGCCGGCAUACAGU | 4043 |
| | | UGCCGGCCdTdT | | | AUAUCdTdT | |
| D-112 | SS-112 | GACCACAGCAGG | 4254 | AS-093 | UCCAAUCCCUGCUG | 4044 |
| | | GAUUGGCdTdT | | | UGGUCdTdT | |
| D-113 | SS-113 | GAGCCACAGGCA | 4255 | AS-094 | UAUCGUCUGCCUGU | 4045 |
| | | GACGAUCdTdT | | | GGCUCdTdT | |
| D-114 | SS-114 | CUAGCUGACGAG | 4256 | AS-095 | UAGACACCUCGUCA | 4046 |
| | | GUGUCUCdTdT | | | GCUAGdTdT | |
| D-115 | SS-115 | AAGGGGGCUGA | 4257 | AS-096 | UUUUACCAUCAGCC | 4047 |
| | | UGGUAAACdTdT | | | CCCUUdTdT | |
| D-116 | SS-116 | AUCAGGGGAUC | 4258 | AS-097 | UCCGCUGCGAUCCC | 4048 |
| | | GCAGCGGCdTdT | | | CUGAUdTdT | |
| D-117 | SS-117 | CCCAGCUCGCCA | 4259 | AS-098 | UCUAGCGUGGCGAG | 4049 |
| | | CGCUAGCdTdT | | | CUGGGdTdT | |
| D-118 | SS-118 | CGUUCAGCUGUG | 4260 | AS-099 | UCUUCGUCACAGCU | 4050 |
| | | ACGAAGCdTdT | | | GAACGdTdT | |
| D-119 | SS-119 | CACUUGCAAGUC | 4261 | AS-100 | UUCAUGGGACUUGC | 4051 |
| | | CCAUGACdTdT | | | AAGUGdTdT | |
| D-120 | SS-120 | UGGGCUAGAUA | 4262 | AS-101 | UUAUAUCCUAUCUA | 4052 |
| | | GGAUAUACdTdT | | | GCCCAdTdT | |
| D-121 | SS-121 | UUUAUGCUUGG | 4263 | AS-102 | UGGUGAAUCCAAGC | 4053 |
| | | AUUCACCCdTdT | | | AUAAAdTdT | |
| D-122 | SS-122 | CCAAAAUCAGGG | 4264 | AS-103 | UGCGAUCCCCUGAU | 4054 |
| | | GAUCGCCdTdT | | | UUUGGdTdT | |
| D-123 | SS-123 | CCGUUCAGCUGU | 4265 | AS-104 | UUUCGUCACAGCUG | 4055 |
| | | GACGAACdTdT | | | AACGGdTdT | |
| D-124 | SS-124 | GGCCACAUCCAA | 4266 | AS-105 | UGAAAUGUUGGAUG | 4056 |
| | | CAUUUCCdTdT | | | UGGCCdTdT | |
| D-125 | SS-125 | UUUAUCAAUAG | 4267 | AS-106 | UAAUGGAACUAUUG | 4057 |
| | | UUCCAUUCdTdT | | | AUAAAdTdT | |
| D-126 | SS-126 | GGCGGAGAUCG | 4268 | AS-107 | UUUGUACACGAUCU | 4058 |
| | | UGUACAACdTdT | | | CCGCCdTdT | |
| D-127 | SS-127 | UCGCCACGCUAG | 4269 | AS-108 | UCGUCAGCUAGCGU | 4059 |
| | | CUGACGCdTdT | | | GGCGAdTdT | |
| D-128 | SS-128 | GUCUGGCUUGCG | 4270 | AS-109 | UUCGCGCCGCAAGC | 4060 |
| | | GCGCGACdTdT | | | CAGACdTdT | |
| D-129 | SS-129 | ACCUCCUAAUAG | 4271 | AS-110 | UCUAAGUCUAUUAG | 4061 |
| | | ACUUAGCdTdT | | | GAGGUdTdT | |
| D-130 | SS-130 | UGUCCCAUCUAC | 4272 | AS-111 | UAGGUCUGUAGAUG | 4062 |
| | | AGACCUCdTdT | | | GGACAdTdT | |
| D-131 | SS-131 | CGGUAAUUCUG | 4273 | AS-112 | UCCACCCUCAGAAU | 4063 |
| | | AGGGUGGCdTdT | | | UACCGdTdT | |
| D-132 | SS-132 | UUUCUUCGGUA | 4274 | AS-113 | UUCAGAAUUACCGA | 4064 |
| | | AUUCUGACdTdT | | | AGAAAdTdT | |
| D-133 | SS-133 | GCACCCUGUUGA | 4275 | AS-114 | UUACAACUCAACAG | 4065 |
| | | GUUGUACdTdT | | | GGUGCdTdT | |
| D-134 | SS-134 | AUAUACUGUAU | 4276 | AS-115 | UAGCCGGCAUACAG | 4066 |
| | | GCCGGCUCdTdT | | | UAUAUdTdT | |
| D-135 | SS-135 | ACUUCUGGUUU | 4277 | AS-116 | UUGUACCCAAACCA | 4067 |
| | | GGGUACACdTdT | | | GAAGUdTdT | |
| D-136 | SS-136 | GAAGCACAGGA | 4278 | AS-117 | UGUCCUAAUCCUGU | 4068 |
| | | UUAGGACCdTdT | | | GCUUCdTdT | |
| D-137 | SS-137 | CUUUCAGGGGUC | 4279 | AS-118 | UGCUUAGGACCCCU | 4069 |
| | | CUAAGCCdTdT | | | GAAAGdTdT | |
| D-138 | SS-138 | GAUAUGCCCCCC | 4280 | AS-119 | UUAAUGAGGGGGGC | 4070 |
| | | UCAUUACdTdT | | | AUAUCdTdT | |
| D-139 | SS-139 | CUAAGGAGGCCG | 4281 | AS-120 | UGCUGAACGGCCUC | 4071 |
| | | UUCAGCCdTdT | | | CUUAGdTdT | |
| D-140 | SS-140 | GGAACACACCCC | 4282 | AS-121 | UUCCAAGGGGGUGU | 4072 |
| | | CUUGGACdTdT | | | GUUCCdTdT | |
| D-141 | SS-141 | CCUAAGCCCACA | 4283 | AS-122 | UCAUGAUUGUGGGC | 4073 |
| | | AUCAUGCdTdT | | | UUAGGdTdT | |
| D-142 | SS-142 | CUGGGGCCUCCC | 4284 | AS-123 | UAAACUUGGGAGGC | 4074 |
| | | AAGUUUCdTdT | | | CCCAGdTdT | |
| D-143 | SS-143 | UGUCCCCCACUU | 4285 | AS-124 | UGGGUGCAAGUGGG | 4075 |
| | | GCACCCCdTdT | | | GGACAdTdT | |
| D-144 | SS-144 | AAGUUAUUACU | 4286 | AS-125 | UUAAUCAGAGUAAU | 4076 |
| | | CUGAUUACdTdT | | | AACUUdTdT | |
| D-145 | SS-145 | AAUAGACUUAG | 4287 | AS-126 | UCAUGGGGCUAAGU | 4077 |
| | | CCCCAUGCdTdT | | | CUAUUdTdT | |
| D-146 | SS-146 | CAGUAAUGACCC | 4288 | AS-127 | UCAACCAGGGUCAU | 4078 |
| | | UGGUUGCdTdT | | | UACUGdTdT | |
| D-147 | SS-147 | GGAGGAAUGUG | 4289 | AS-128 | UUAUCUUACACAUU | 4079 |
| | | UAAGAUACdTdT | | | CCUCCdTdT | |
| D-148 | SS-148 | CAAUCAUGCCUC | 4290 | AS-129 | UCUUAGGGAGGCAU | 4080 |
| | | CCUAAGCdTdT | | | GAUUGdTdT | |
| D-149 | SS-149 | UCCACUCAUCCA | 4291 | AS-130 | UCCCAGUUGGAUGA | 4081 |
| | | ACUGGGCdTdT | | | GUGGAdTdT | |
| D-150 | SS-150 | AGGUGCAGGCG | 4292 | AS-131 | UAUUCCUACGCCUG | 4082 |
| | | UAGGAAUCdTdT | | | CACCUdTdT | |
| D-151 | SS-151 | GAUAGGAUAUA | 4293 | AS-132 | UCAUACAGUAUAUC | 4083 |
| | | CUGUAUGCdTdT | | | CUAUCdTdT | |
| D-152 | SS-152 | UCCUAAGCCCAC | 4294 | AS-133 | UAUGAUUGUGGGCU | 4084 |
| | | AAUCAUCdTdT | | | UAGGAdTdT | |
| D-153 | SS-153 | GGCCGUUCAGCU | 4295 | AS-134 | UCGUCACAGCUGAA | 4085 |
| | | GUGACGCdTdT | | | CGGCCdTdT | |
| D-154 | SS-154 | UGGCCACAUCCA | 4296 | AS-135 | UAAAUGUUGGAUGU | 4086 |
| | | ACAUUUCdTdT | | | GGCCAdTdT | |
| D-155 | SS-155 | AGCAGGACUAU | 4297 | AS-136 | UGCCAGAAAUAGUC | 4087 |
| | | UUCUGGCCdTdT | | | CUGCUdTdT | |
| D-156 | SS-156 | AUAUGGACAUC | 4298 | AS-137 | UGCAACCAGAUGUC | 4088 |
| | | UGGUUGCCdTdT | | | CAUAUdTdT | |
| D-157 | SS-157 | ACUUGCACCCUA | 4299 | AS-138 | UACAAGCUAGGGUG | 4089 |
| | | GCUUGUCdTdT | | | CAAGUdTdT | |
| D-158 | SS-158 | GUAAAGAGGUU | 4300 | AS-139 | UGGUUAGAAACCUC | 4090 |
| | | UCUAACCCdTdT | | | UUUACdTdT | |
| D-159 | SS-159 | GACUCACUUUAU | 4301 | AS-140 | UCUAUUGAUAAAGU | 4091 |
| | | CAAUAGCdTdT | | | GAGUCdTdT | |
| D-160 | SS-160 | AGCUGCUGACUC | 4302 | AS-141 | UUAAAGUGAGUCAG | 4092 |
| | | ACUUUACdTdT | | | CAGCUdTdT | |
| D-161 | SS-161 | AAGGGUUACCCU | 4303 | AS-142 | UGUGCCCAGGGUAA | 4093 |
| | | GGGCACCdTdT | | | CCCUUdTdT | |
| D-162 | SS-162 | UGUAAAGAGGU | 4304 | AS-143 | UGUUAGAAACCUCU | 4094 |
| | | UUCUAACCdTdT | | | UUACAdTdT | |
| D-163 | SS-163 | UGGCUUGCGGCG | 4305 | AS-144 | UUCCUCGCGCCGCA | 4095 |
| | | CGAGGACdTdT | | | AGCCAdTdT | |
| D-164 | SS-164 | GCCACGCUAGCU | 4306 | AS-145 | UCUCGUCAGCUAGC | 4096 |
| | | GACGAGCdTdT | | | GUGGCdTdT | |
| D-165 | SS-165 | CCCAAAGGAGGC | 4307 | AS-146 | UUUGUAAGCCUCCU | 4097 |
| | | UUACAACdTdT | | | UUGGGdTdT | |
| D-166 | SS-166 | UGUUGUGCUAU | 4308 | AS-147 | UUCCCCCCAUAGCA | 4098 |
| | | GGGGGGACdTdT | | | CAACAdTdT | |
| D-167 | SS-167 | GGGAACACACCC | 4309 | AS-148 | UCCAAGGGGGUGUG | 4099 |
| | | CCUUGGCdTdT | | | UUCCCdTdT | |
| D-168 | SS-168 | UUCCAAAUUGA | 4310 | AS-149 | UCCACCCAUCAAUU | 4100 |
| | | UGGGUGGCdTdT | | | UGGAAdTdT | |
| D-169 | SS-169 | ACCGGCAGCAUC | 4311 | AS-150 | UCAUGUCGAUGCUG | 4101 |
| | | GACAUGCdTdT | | | CCGGUdTdT | |
| D-170 | SS-170 | CUGGCUUGCGGC | 4312 | AS-151 | UCCUCGCGCCGCAA | 4102 |
| | | GCGAGGCdTdT | | | GCCAGdTdT | |
| D-171 | SS-171 | GUGUAAGAUAG | 4313 | AS-152 | UAUGUUAACUAUCU | 4103 |
| | | UUAACAUCdTdT | | | UACACdTdT | |
| D-172 | SS-172 | AGGAUUAGGAC | 4314 | AS-153 | UCGCUUCAGUCCUA | 4104 |
| | | UGAAGCGCdTdT | | | AUCCUdTdT | |
| D-173 | SS-173 | AAUGUGUAAGA | 4315 | AS-154 | UUUAACUAUCUUAC | 4105 |
| | | UAGUUAACdTdT | | | ACAUUdTdT | |
| D-174 | SS-174 | GGCCAGCCUAAG | 4316 | AS-155 | UCAUGAUCUUAGGC | 4106 |
| | | AUCAUGCdTdT | | | UGGCCdTdT | |
| D-175 | SS-175 | AGUUCCAUUUA | 4317 | AS-156 | UGUCAAUUUAAAUG | 4107 |
| | | AAUUGACCdTdT | | | GAACUdTdT | |
| D-176 | SS-176 | UCCAUUUAAAU | 4318 | AS-157 | UGAAGUCAAUUUAA | 4108 |
| | | UGACUUCCdTdT | | | AUGGAdTdT | |
| D-177 | SS-177 | CCCACCCUCACG | 4319 | AS-158 | UACACCUCGUGAGG | 4109 |
| | | AGGUGUCdTdT | | | GUGGGdTdT | |
| D-178 | SS-178 | CAUCUUAGCUUA | 4320 | AS-159 | UGAAAGCUAAGCUA | 4110 |
| | | GCUUUCCdTdT | | | AGAUGdTdT | |
| D-179 | SS-179 | ACUUAGCCCCAU | 4321 | AS-160 | UAAACUCAUGGGGC | 4111 |
| | | GAGUUUCdTdT | | | UAAGUdTdT | |
| D-180 | SS-180 | UCAUGGUUUAG | 4322 | AS-161 | UGAUCACCCUAAAC | 4112 |
| | | GGUGAUCCdTdT | | | CAUGAdTdT | |
| D-181 | SS-181 | GCCUGAAGCACA | 4323 | AS-162 | UUAAUCCUGUGCUU | 4113 |
| | | GGAUUACdTdT | | | CAGGCdTdT | |
| D-182 | SS-182 | CAUACUGAGGG | 4324 | AS-163 | UAAUUUCACCCUCA | 4114 |
| | | UGAAAUUCdTdT | | | GUAUGdTdT | |
| D-183 | SS-183 | AAGAUCAUGGU | 4325 | AS-164 | UACCCUAAACCAUG | 4115 |
| | | UUAGGGUCdTdT | | | AUCUUdTdT | |
| D-184 | SS-184 | GGGAUCUCCCCC | 4326 | AS-165 | UCCACAAGGGGGAG | 4116 |
| | | UUGUGGCdTdT | | | AUCCCdTdT | |
| D-185 | SS-185 | GAGGAAUGUGU | 4327 | AS-166 | UCUAUCUUACACAU | 4117 |
| | | AAGAUAGCdTdT | | | UCCUCdTdT | |
| D-186 | SS-186 | AUCAUGGUUUA | 4328 | AS-167 | UAUCACCCUAAACC | 4118 |
| | | GGGUGAUCdTdT | | | AUGAUdTdT | |
| D-187 | SS-187 | CAGCAUCGACAU | 4329 | AS-168 | UUCUACCAUGUCGA | 4119 |
| | | GGUAGACdTdT | | | UGCUGdTdT | |
| D-188 | SS-188 | GGUGCAGGCGU | 4330 | AS-169 | UUAUUCCUACGCCU | 4120 |
| | | AGGAAUACdTdT | | | GCACCdTdT | |
| D-189 | SS-189 | AGGAAUGUGUA | 4331 | AS-170 | UACUAUCUUACACA | 4121 |
| | | AGAUAGUCdTdT | | | UUCCUdTdT | |
| D-190 | SS-190 | CAUGGUUUAGG | 4332 | AS-171 | UUGAUCACCCUAAA | 4122 |
| | | GUGAUCACdTdT | | | CCAUGdTdT | |
| D-191 | SS-191 | UCCACCCAAGUC | 4333 | AS-172 | UGACGGCGACUUGG | 4123 |
| | | GCCGUCCdTdT | | | GUGGAdTdT | |
| D-192 | SS-192 | UCAGUAAUGACC | 4334 | AS-173 | UAACCAGGGUCAUU | 4124 |
| | | CUGGUUCdTdT | | | ACUGAdTdT | |
| D-193 | SS-193 | CUGGGACUUUA | 4335 | AS-174 | UUUAGCCCUAAAGU | 4125 |
| | | GGGCUAACdTdT | | | CCCAGdTdT | |
| D-194 | SS-194 | CAGGCGUAGGA | 4336 | AS-175 | UUCCAUAUUCCUAC | 4126 |
| | | AUAUGGACdTdT | | | GCCUGdTdT | |
| D-195 | SS-195 | GCAGGCGUAGG | 4337 | AS-176 | UCCAUAUUCCUACG | 4127 |
| | | AAUAUGGCdTdT | | | CCUGCdTdT | |
| D-196 | SS-196 | AGCCACGAGGUC | 4338 | AS-177 | UCGCCCCGACCUCG | 4128 |
| | | GGGGCGCdTdT | | | UGGCUdTdT | |
| D-197 | SS-197 | AAUCAUGCCUCC | 4339 | AS-178 | UUCUUAGGGAGGCA | 4129 |
| | | CUAAGACdTdT | | | UGAUUdTdT | |
| D-198 | SS-198 | UAAGCCGUUGGC | 4340 | AS-179 | UAGAGGUGCCAACG | 4130 |
| | | ACCUCUCdTdT | | | GCUUAdTdT | |
| D-199 | SS-199 | AUCGACAUGGU | 4341 | AS-180 | UCGAGUCUACCAUG | 4131 |
| | | AGACUCGCdTdT | | | UCGAUdTdT | |
| D-200 | SS-200 | UCUUCGGUAAU | 4342 | AS-181 | UCCUCAGAAUUACC | 4132 |
| | | UCUGAGGCdTdT | | | GAAGAdTdT | |
| D-201 | SS-201 | AAGUCGCCAGUG | 4343 | AS-182 | UAGACACCACUGGC | 4133 |
| | | GUGUCUCdTdT | | | GACUUdTdT | |
| D-202 | SS-202 | AUAAAUUGAAA | 4344 | AS-183 | UCGUGCCUUUUCAA | 4134 |
| | | AGGCACGCdTdT | | | UUUAUdTdT | |
| D-203 | SS-203 | GUUAGAGGCCCU | 4345 | AS-184 | UACCCCAAGGGCCU | 4135 |
| | | UGGGGUCdTdT | | | CUAACdTdT | |
| D-204 | SS-204 | AAUCAGGGGAU | 4346 | AS-185 | UCGCUGCGAUCCCC | 4136 |
| | | CGCAGCGCdTdT | | | UGAUUdTdT | |
| D-205 | SS-205 | UAAGAUAGUUA | 4347 | AS-186 | UCCCAUGUUAACUA | 4137 |
| | | ACAUGGGCdTdT | | | UCUUAdTdT | |
| D-206 | SS-206 | UGUAAGAUAGU | 4348 | AS-187 | UCAUGUUAACUAUC | 4138 |
| | | UAACAUGCdTdT | | | UUACAdTdT | |
| D-207 | SS-207 | CGGCCGCCUGUC | 4349 | AS-188 | UACCAAGGACAGGC | 4139 |
| | | CUUGGUCdTdT | | | GGCCGdTdT | |
| D-208 | SS-208 | UUAGAGGCCCUU | 4350 | AS-189 | UAACCCCAAGGGCC | 4140 |
| | | GGGGUUCdTdT | | | UCUAAdTdT | |
| D-209 | SS-209 | GGGAUCGCAGCG | 4351 | AS-190 | UUGUAGCCGCUGCG | 4141 |
| | | GCUACACdTdT | | | AUCCCdTdT | |
| D-210 | SS-210 | CACGAGGUCGGG | 4352 | AS-191 | UCCUCGCCCCGACC | 4142 |
| | | GCGAGGCdTdT | | | UCGUGdTdT | |

TABLE 5
Exemplary sense and antisense strand sequence for targeting MAPT

| | | | SS | | | AS |
|---|---|---|---|---|---|---|
| SIRNA | | | SEQ | | | SEQ |
| Duplex | | Sense Strand | ID | | Antisense Strand | ID |
| ID | SS ID | Sequence (5′-3′) | NO | AS ID | Sequence (5′-3′) | NO |
| D-001 | SS-001 | GCUUUGGCUCGG | 4477 | AS-001 | UGAAGUCCCGAGCC | 4687 |
| | | GACUUCC | | | AAAGC | |
| D-002 | SS-002 | CGACAUGGUAG | 4478 | AS-002 | UGGCGAGUCUACCA | 4688 |
| | | ACUCGCCC | | | UGUCG | |
| D-003 | SS-003 | CUCCUCGCAGUU | 4479 | AS-003 | UUAACCGAACUGCG | 4689 |
| | | CGGUUAC | | | AGGAG | |
| D-004 | SS-004 | GGCUUUGGCUCG | 4480 | AS-004 | UAAGUCCCGAGCCA | 4690 |
| | | GGACUUC | | | AAGCC | |
| D-005 | SS-005 | GGCUUUGGCUCG | 4481 | AS-004 | UAAGUCCCGAGCCA | 4690 |
| | | GGACUUA | | | AAGCC | |
| D-006 | SS-006 | GGCUUUGGCUCG | 4482 | AS-004 | UAAGUCCCGAGCCA | 4690 |
| | | GGACUUU | | | AAGCC | |
| D-007 | SS-007 | GGCUUUGGCACG | 4483 | AS-004 | UAAGUCCCGAGCCA | 4690 |
| | | GGACUUC | | | AAGCC | |
| D-008 | SS-008 | GGCUUUGGCUCG | 4484 | AS-004 | UAAGUCCCGAGCCA | 4690 |
| | | GGACUUG | | | AAGCC | |
| D-009 | SS-009 | GCAUCGACAUGG | 4485 | AS-005 | UAGUCUACCAUGUC | 4691 |
| | | UAGACUC | | | GAUGC | |
| D-010 | SS-010 | GCAUCGACAUGG | 4486 | AS-005 | UAGUCUACCAUGUC | 4691 |
| | | UAGACUA | | | GAUGC | |
| D-011 | SS-011 | GCAUCGACAUGG | 4487 | AS-005 | UAGUCUACCAUGUC | 4691 |
| | | UAGACUU | | | GAUGC | |
| D-012 | SS-012 | GCAUCGACAAGG | 4488 | AS-005 | UAGUCUACCAUGUC | 4691 |
| | | UAGACUC | | | GAUGC | |
| D-013 | SS-013 | GCAUCGACAUGG | 4489 | AS-005 | UAGUCUACCAUGUC | 4691 |
| | | UAGACUG | | | GAUGC | |
| D-014 | SS-014 | UGCUCCUCGCAG | 4490 | AS-006 | UACCGAACUGCGAG | 4692 |
| | | UUCGGUC | | | GAGCA | |
| D-015 | SS-015 | CACCCAAGUCGC | 4491 | AS-007 | UAAGACGGCGACUU | 4693 |
| | | CGUCUUC | | | GGGUG | |
| D-016 | SS-016 | CCUCGCAGUUCG | 4492 | AS-008 | UAUUAACCGAACUG | 4694 |
| | | GUUAAUC | | | CGAGG | |
| D-017 | SS-017 | UCCUCGCAGUUC | 4493 | AS-009 | UUUAACCGAACUGC | 4695 |
| | | GGUUAAC | | | GAGGA | |
| D-018 | SS-018 | AGCUGACCUUCC | 4494 | AS-010 | UUCUCGCGGAAGGU | 4696 |
| | | GCGAGAC | | | CAGCU | |
| D-019 | SS-019 | GACUGGAAGCG | 4495 | AS-011 | UUUGUCAUCGCUUC | 4697 |
| | | AUGACAAC | | | CAGUC | |
| D-020 | SS-020 | GACUGGAAGCG | 4496 | AS-011 | UUUGUCAUCGCUUC | 4697 |
| | | AUGACAAA | | | CAGUC | |
| D-021 | SS-021 | GACUGGAAGCG | 4497 | AS-011 | UUUGUCAUCGCUUC | 4697 |
| | | AUGACAAU | | | CAGUC | |
| D-022 | SS-022 | GACUGGAAGGG | 4498 | AS-011 | UUUGUCAUCGCUUC | 4697 |
| | | AUGACAAC | | | CAGUC | |
| D-023 | SS-023 | GACUGGAAGCG | 4499 | AS-011 | UUUGUCAUCGCUUC | 4697 |
| | | AUGACAAG | | | CAGUC | |
| D-024 | SS-024 | AGCUCGCAUGGU | 4500 | AS-012 | UUUACUGACCAUGC | 4698 |
| | | CAGUAAC | | | GAGCU | |
| D-025 | SS-025 | AGUCUACAAACC | 4501 | AS-013 | UUCAACUGGUUUGU | 4699 |
| | | AGUUGAC | | | AGACU | |
| D-026 | SS-026 | GCUCCUCGCAGU | 4502 | AS-014 | UAACCGAACUGCGA | 4700 |
| | | UCGGUUC | | | GGAGC | |
| D-027 | SS-027 | GCUCCUCGCAGU | 4503 | AS-014 | UAACCGAACUGCGA | 4700 |
| | | UCGGUUG | | | GGAGC | |
| D-028 | SS-028 | GCUCCUCGCAGU | 4504 | AS-014 | UAACCGAACUGCGA | 4700 |
| | | UCGGUUU | | | GGAGC | |
| D-029 | SS-029 | GCUCCUCGCUGU | 4505 | AS-014 | UAACCGAACUGCGA | 4700 |
| | | UCGGUUC | | | GGAGC | |
| D-030 | SS-030 | CUUCCGCGAGAA | 4506 | AS-015 | UUUGGCGUUCUCGC | 4701 |
| | | CGCCAAC | | | GGAAG | |
| D-031 | SS-031 | CUUCCGCGAGAA | 4507 | AS-015 | UUUGGCGUUCUCGC | 4701 |
| | | CGCCAAA | | | GGAAG | |
| D-032 | SS-032 | CUUCCGCGAGAA | 4508 | AS-015 | UUUGGCGUUCUCGC | 4701 |
| | | CGCCAAU | | | GGAAG | |
| D-033 | SS-033 | CUUCCGCGACAA | 4509 | AS-015 | UUUGGCGUUCUCGC | 4701 |
| | | CGCCAAC | | | GGAAG | |
| D-034 | SS-034 | CUUCCGCGAGAA | 4510 | AS-015 | UUUGGCGUUCUCGC | 4701 |
| | | CGCCAAG | | | GGAAG | |
| D-035 | SS-035 | AAAUCAGUGAU | 4511 | AS-016 | UUACUCCCAUCACU | 4702 |
| | | GGGAGUAC | | | GAUUU | |
| D-036 | SS-036 | GUCGCCGUCUUC | 4512 | AS-017 | UUUGGCGGAAGACG | 4703 |
| | | CGCCAAC | | | GCGAC | |
| D-037 | SS-037 | AUGGUAAAACG | 4513 | AS-018 | UCGAUCUUCGUUUU | 4704 |
| | | AAGAUCGC | | | ACCAU | |
| D-038 | SS-038 | ACGAAGAUCGCC | 4514 | AS-019 | UCGGUGUGGCGAUC | 4705 |
| | | ACACCGC | | | UUCGU | |
| D-039 | SS-039 | CGCAGUUCGGUU | 4515 | AS-020 | UCCAAUUAACCGAA | 4706 |
| | | AAUUGGC | | | CUGCG | |
| D-040 | SS-040 | GUACUCCACCCA | 4516 | AS-021 | UGCGACUUGGGUGG | 4707 |
| | | AGUCGCC | | | AGUAC | |
| D-041 | SS-041 | CUCGGCUUUGGC | 4517 | AS-022 | UUCCCGAGCCAAAG | 4708 |
| | | UCGGGAC | | | CCGAG | |
| D-042 | SS-042 | GCCCCUGGGGCG | 4518 | AS-023 | UAUUGACCGCCCCA | 4709 |
| | | GUCAAUC | | | GGGGC | |
| D-043 | SS-043 | CUCGCAGUUCGG | 4519 | AS-024 | UAAUUAACCGAACU | 4710 |
| | | UUAAUUC | | | GCGAG | |
| D-044 | SS-044 | UCGCCGUCUUCC | 4520 | AS-025 | UCUUGGCGGAAGAC | 4711 |
| | | GCCAAGC | | | GGCGA | |
| D-045 | SS-045 | GACGGGACUGG | 4521 | AS-026 | UAUCGCUUCCAGUC | 4712 |
| | | AAGCGAUC | | | CCGUC | |
| D-046 | SS-046 | UGGUAAAACGA | 4522 | AS-027 | UGCGAUCUUCGUUU | 4713 |
| | | AGAUCGCC | | | UACCA | |
| D-047 | SS-047 | GUAAAACGAAG | 4523 | AS-028 | UUGGCGAUCUUCGU | 4714 |
| | | AUCGCCAC | | | UUUAC | |
| D-048 | SS-048 | ACAAUAUCACCC | 4524 | AS-029 | UGGACGUGGGUGAU | 4715 |
| | | ACGUCCC | | | AUUGU | |
| D-049 | SS-049 | CCUUCCGCGAGA | 4525 | AS-030 | UUGGCGUUCUCGCG | 4716 |
| | | ACGCCAC | | | GAAGG | |
| D-050 | SS-050 | GGGGGCUGAUG | 4526 | AS-031 | UGUUUUACCAUCAG | 4717 |
| | | GUAAAACC | | | CCCCC | |
| D-051 | SS-051 | GCCGUCUUCCGC | 4527 | AS-032 | UCUCUUGGCGGAAG | 4718 |
| | | CAAGAGC | | | ACGGC | |
| D-052 | SS-052 | CACCGGCAGCAU | 4528 | AS-033 | UAUGUCGAUGCUGC | 4719 |
| | | CGACAUC | | | CGGUG | |
| D-053 | SS-053 | GUAAAAGCAAA | 4529 | AS-034 | UUCCCGUCUUUGCU | 4720 |
| | | GACGGGAC | | | UUUAC | |
| D-054 | SS-054 | AGGUUUCUAACC | 4530 | AS-035 | UAGGGUGGGUUAGA | 4721 |
| | | CACCCUC | | | AACCU | |
| D-055 | SS-055 | UUCCGCGAGAAC | 4531 | AS-036 | UUUUGGCGUUCUCG | 4722 |
| | | GCCAAAC | | | CGGAA | |
| D-056 | SS-056 | GACCUUCCGCGA | 4532 | AS-037 | UGCGUUCUCGCGGA | 4723 |
| | | GAACGCC | | | AGGUC | |
| D-057 | SS-057 | CGCCACGCUAGC | 4533 | AS-038 | UUCGUCAGCUAGCG | 4724 |
| | | UGACGAC | | | UGGCG | |
| D-058 | SS-058 | ACCUGCGUGUCC | 4534 | AS-039 | UUAGAUGGGACACG | 4725 |
| | | CAUCUAC | | | CAGGU | |
| D-059 | SS-059 | CCCCAGCUCGCC | 4535 | AS-040 | UUAGCGUGGCGAGC | 4726 |
| | | ACGCUAC | | | UGGGG | |
| D-060 | SS-060 | GCCGUUCAGCUG | 4536 | AS-041 | UUCGUCACAGCUGA | 4727 |
| | | UGACGAC | | | ACGGC | |
| D-061 | SS-061 | GCUGAUGGUAA | 4537 | AS-042 | UCUUCGUUUUACCA | 4728 |
| | | AACGAAGC | | | UCAGC | |
| D-062 | SS-062 | ACGAGGUGUCUC | 4538 | AS-043 | UGGGUGAGAGACAC | 4729 |
| | | UCACCCC | | | CUCGU | |
| D-063 | SS-063 | GGGCCAGCCUAA | 4539 | AS-044 | UAUGAUCUUAGGCU | 4730 |
| | | GAUCAUC | | | GGCCC | |
| D-064 | SS-064 | UCUAACCCACCC | 4540 | AS-045 | UUCGUGAGGGUGGG | 4731 |
| | | UCACGAC | | | UUAGA | |
| D-065 | SS-065 | UAAAGAGGUUU | 4541 | AS-046 | UGGGUUAGAAACCU | 4732 |
| | | CUAACCCC | | | CUUUA | |
| D-066 | SS-066 | CUCACCUCCUAA | 4542 | AS-047 | UAGUCUAUUAGGAG | 4733 |
| | | UAGACUC | | | GUGAG | |
| D-067 | SS-067 | GGAUAUACUGU | 4543 | AS-048 | UCCGGCAUACAGUA | 4734 |
| | | AUGCCGGC | | | UAUCC | |
| D-068 | SS-068 | CACCCUCACGAG | 4544 | AS-049 | UAGACACCUCGUGA | 4735 |
| | | GUGUCUC | | | GGGUG | |
| D-069 | SS-069 | CACGCUAGCUGA | 4545 | AS-050 | UACCUCGUCAGCUA | 4736 |
| | | CGAGGUC | | | GCGUG | |
| D-070 | SS-070 | UCCCAUGAUUUC | 4546 | AS-051 | UACCGAAGAAAUCA | 4737 |
| | | UUCGGUC | | | UGGGA | |
| D-071 | SS-071 | UUGAGUUGUAG | 4547 | AS-052 | UAAUCCAACUACAA | 4738 |
| | | UUGGAUUC | | | CUCAA | |
| D-072 | SS-072 | CUGCGUGUCCCA | 4548 | AS-053 | UUGUAGAUGGGACA | 4739 |
| | | UCUACAC | | | CGCAG | |
| D-073 | SS-073 | GUUGAGUUGUA | 4549 | AS-054 | UAUCCAACUACAAC | 4740 |
| | | GUUGGAUC | | | UCAAC | |
| D-074 | SS-074 | GGUGGUGGUUA | 4550 | AS-055 | UAUAUCUCUAACCA | 4741 |
| | | GAGAUAUC | | | CCACC | |
| D-075 | SS-075 | GGGCUAGAUAG | 4551 | AS-056 | UGUAUAUCCUAUCU | 4742 |
| | | GAUAUACC | | | AGCCC | |
| D-076 | SS-076 | AGGAUUCCAGCA | 4552 | AS-057 | UGGUUUUUGCUGGA | 4743 |
| | | AAAACCC | | | AUCCU | |
| D-077 | SS-077 | GGCCCCUGGGGC | 4553 | AS-058 | UUUGACCGCCCCAG | 4744 |
| | | GGUCAAC | | | GGGCC | |
| D-078 | SS-078 | GAUUAGGACUG | 4554 | AS-059 | UAUCGCUUCAGUCC | 4745 |
| | | AAGCGAUC | | | UAAUC | |
| D-079 | SS-079 | CUCCCAAGUUUU | 4555 | AS-060 | UCCUUUCAAAACUU | 4746 |
| | | GAAAGGC | | | GGGAG | |
| D-080 | SS-080 | GCUGGUCUGGCU | 4556 | AS-061 | UGCCGCAAGCCAGA | 4747 |
| | | UGCGGCC | | | CCAGC | |
| D-081 | SS-081 | GUUCCACUCAUC | 4557 | AS-062 | UCAGUUGGAUGAGU | 4748 |
| | | CAACUGC | | | GGAAC | |
| D-082 | SS-082 | CACCUCCUAAUA | 4558 | AS-063 | UUAAGUCUAUUAGG | 4749 |
| | | GACUUAC | | | AGGUG | |
| D-083 | SS-083 | UUCUAACCCACC | 4559 | AS-064 | UCGUGAGGGUGGGU | 4750 |
| | | CUCACGC | | | UAGAA | |
| D-084 | SS-084 | AAGCCCACAAUC | 4560 | AS-065 | UAGGCAUGAUUGUG | 4751 |
| | | AUGCCUC | | | GGCUU | |
| D-085 | SS-085 | ACCUUCCGCGAG | 4561 | AS-066 | UGGCGUUCUCGCGG | 4752 |
| | | AACGCCC | | | AAGGU | |
| D-086 | SS-086 | GCUGGUCACGUG | 4562 | AS-067 | UUUGGGUCACGUGA | 4753 |
| | | ACCCAAC | | | CCAGC | |
| D-087 | SS-087 | UAACCCACCCUC | 4563 | AS-068 | UCCUCGUGAGGGUG | 4754 |
| | | ACGAGGC | | | GGUUA | |
| D-088 | SS-088 | CUUACAACUCCU | 4564 | AS-069 | UUGAUGCAGGAGUU | 4755 |
| | | GCAUCAC | | | GUAAG | |
| D-089 | SS-089 | UGGGACUUUAG | 4565 | AS-070 | UGUUAGCCCUAAAG | 4756 |
| | | GGCUAACC | | | UCCCA | |
| D-090 | SS-090 | GCCACAGGCAGA | 4566 | AS-071 | UACAUCGUCUGCCU | 4757 |
| | | CGAUGUC | | | GUGGC | |
| D-091 | SS-091 | GCCUCUUGGGAG | 4567 | AS-072 | UGGACGUCUCCCAA | 4758 |
| | | ACGUCCC | | | GAGGC | |
| D-092 | SS-092 | GAGAUAUGCCCC | 4568 | AS-073 | UAUGAGGGGGGCAU | 4759 |
| | | CCUCAUC | | | AUCUC | |
| D-093 | SS-093 | UCCCAAGUUUUG | 4569 | AS-074 | UGCCUUUCAAAACU | 4760 |
| | | AAAGGCC | | | UGGGA | |
| D-094 | SS-094 | AGUUAUUACUC | 4570 | AS-075 | UUUAAUCAGAGUAA | 4761 |
| | | UGAUUAAC | | | UAACU | |
| D-095 | SS-095 | UAUGCCCCCCUC | 4571 | AS-076 | UAGUAAUGAGGGGG | 4762 |
| | | AUUACUC | | | GCAUA | |
| D-096 | SS-096 | CAAAAUCAGGG | 4572 | AS-077 | UUGCGAUCCCCUGA | 4763 |
| | | GAUCGCAC | | | UUUUG | |
| D-097 | SS-097 | CAGACCACGGGG | 4573 | AS-078 | UUCUCCGCCCCGUG | 4764 |
| | | CGGAGAC | | | GUCUG | |
| D-098 | SS-098 | CUUGGGUGGGC | 4574 | AS-079 | UCUAUCUAGCCCAC | 4765 |
| | | UAGAUAGC | | | CCAAG | |
| D-099 | SS-099 | CUCGCCACGCUA | 4575 | AS-080 | UGUCAGCUAGCGUG | 4766 |
| | | GCUGACC | | | GCGAG | |
| D-100 | SS-100 | UGUUGAGUUGU | 4576 | AS-081 | UUCCAACUACAACU | 4767 |
| | | AGUUGGAC | | | CAACA | |
| D-101 | SS-101 | UAUACAUAGAU | 4577 | AS-082 | UGGGCAACAUCUAU | 4768 |
| | | GUUGCCCC | | | GUAUA | |
| D-102 | SS-102 | AACCCACCCUCA | 4578 | AS-083 | UACCUCGUGAGGGU | 4769 |
| | | CGAGGUC | | | GGGUU | |
| D-103 | SS-103 | GUUGAGCAGGA | 4579 | AS-084 | UGAAAUAGUCCUGC | 4770 |
| | | CUAUUUCC | | | UCAAC | |
| D-104 | SS-104 | CCACGCUAGCUG | 4580 | AS-085 | UCCUCGUCAGCUAG | 4771 |
| | | ACGAGGC | | | CGUGG | |
| D-105 | SS-105 | CUCCUAAUAGAC | 4581 | AS-086 | UGGCUAAGUCUAUU | 4772 |
| | | UUAGCCC | | | AGGAG | |
| D-106 | SS-106 | GAUUUCUUCGG | 4582 | AS-087 | UAGAAUUACCGAAG | 4773 |
| | | UAAUUCUC | | | AAAUC | |
| D-107 | SS-107 | GUCCCAAAGGAG | 4583 | AS-088 | UGUAAGCCUCCUUU | 4774 |
| | | GCUUACC | | | GGGAC | |
| D-108 | SS-108 | GGUGGUUAGAG | 4584 | AS-089 | UGGCAUAUCUCUAA | 4775 |
| | | AUAUGCCC | | | CCACC | |
| D-109 | SS-109 | GGCUAGAUAGG | 4585 | AS-090 | UAGUAUAUCCUAUC | 4776 |
| | | AUAUACUC | | | UAGCC | |
| D-110 | SS-110 | AUUCACCAGAGU | 4586 | AS-091 | UAUAGUCACUCUGG | 4777 |
| | | GACUAUC | | | UGAAU | |
| D-111 | SS-111 | GAUAUACUGUA | 4587 | AS-092 | UGCCGGCAUACAGU | 4778 |
| | | UGCCGGCC | | | AUAUC | |
| D-112 | SS-112 | GACCACAGCAGG | 4588 | AS-093 | UCCAAUCCCUGCUG | 4779 |
| | | GAUUGGC | | | UGGUC | |
| D-113 | SS-113 | GAGCCACAGGCA | 4589 | AS-094 | UAUCGUCUGCCUGU | 4780 |
| | | GACGAUC | | | GGCUC | |
| D-114 | SS-114 | CUAGCUGACGAG | 4590 | AS-095 | UAGACACCUCGUCA | 4781 |
| | | GUGUCUC | | | GCUAG | |
| D-115 | SS-115 | AAGGGGGCUGA | 4591 | AS-096 | UUUUACCAUCAGCC | 4782 |
| | | UGGUAAAC | | | CCCUU | |
| D-116 | SS-116 | AUCAGGGGAUC | 4592 | AS-097 | UCCGCUGCGAUCCC | 4783 |
| | | GCAGCGGC | | | CUGAU | |
| D-117 | SS-117 | CCCAGCUCGCCA | 4593 | AS-098 | UCUAGCGUGGCGAG | 4784 |
| | | CGCUAGC | | | CUGGG | |
| D-118 | SS-118 | CGUUCAGCUGUG | 4594 | AS-099 | UCUUCGUCACAGCU | 4785 |
| | | ACGAAGC | | | GAACG | |
| D-119 | SS-119 | CACUUGCAAGUC | 4595 | AS-100 | UUCAUGGGACUUGC | 4786 |
| | | CCAUGAC | | | AAGUG | |
| D-120 | SS-120 | UGGGCUAGAUA | 4596 | AS-101 | UUAUAUCCUAUCUA | 4787 |
| | | GGAUAUAC | | | GCCCA | |
| D-121 | SS-121 | UUUAUGCUUGG | 4597 | AS-102 | UGGUGAAUCCAAGC | 4788 |
| | | AUUCACCC | | | AUAAA | |
| D-122 | SS-122 | CCAAAAUCAGGG | 4598 | AS-103 | UGCGAUCCCCUGAU | 4789 |
| | | GAUCGCC | | | UUUGG | |
| D-123 | SS-123 | CCGUUCAGCUGU | 4599 | AS-104 | UUUCGUCACAGCUG | 4790 |
| | | GACGAAC | | | AACGG | |
| D-124 | SS-124 | GGCCACAUCCAA | 4600 | AS-105 | UGAAAUGUUGGAUG | 4791 |
| | | CAUUUCC | | | UGGCC | |
| D-125 | SS-125 | UUUAUCAAUAG | 4601 | AS-106 | UAAUGGAACUAUUG | 4792 |
| | | UUCCAUUC | | | AUAAA | |
| D-126 | SS-126 | GGCGGAGAUCG | 4602 | AS-107 | UUUGUACACGAUCU | 4793 |
| | | UGUACAAC | | | CCGCC | |
| D-127 | SS-127 | UCGCCACGCUAG | 4603 | AS-108 | UCGUCAGCUAGCGU | 4794 |
| | | CUGACGC | | | GGCGA | |
| D-128 | SS-128 | GUCUGGCUUGCG | 4604 | AS-109 | UUCGCGCCGCAAGC | 4795 |
| | | GCGCGAC | | | CAGAC | |
| D-129 | SS-129 | ACCUCCUAAUAG | 4605 | AS-110 | UCUAAGUCUAUUAG | 4796 |
| | | ACUUAGC | | | GAGGU | |
| D-130 | SS-130 | UGUCCCAUCUAC | 4606 | AS-111 | UAGGUCUGUAGAUG | 4797 |
| | | AGACCUC | | | GGACA | |
| D-131 | SS-131 | CGGUAAUUCUG | 4607 | AS-112 | UCCACCCUCAGAAU | 4798 |
| | | AGGGUGGC | | | UACCG | |
| D-132 | SS-132 | UUUCUUCGGUA | 4608 | AS-113 | UUCAGAAUUACCGA | 4799 |
| | | AUUCUGAC | | | AGAAA | |
| D-133 | SS-133 | GCACCCUGUUGA | 4609 | AS-114 | UUACAACUCAACAG | 4800 |
| | | GUUGUAC | | | GGUGC | |
| D-134 | SS-134 | AUAUACUGUAU | 4610 | AS-115 | UAGCCGGCAUACAG | 4801 |
| | | GCCGGCUC | | | UAUAU | |
| D-135 | SS-135 | ACUUCUGGUUU | 4611 | AS-116 | UUGUACCCAAACCA | 4802 |
| | | GGGUACAC | | | GAAGU | |
| D-136 | SS-136 | GAAGCACAGGA | 4612 | AS-117 | UGUCCUAAUCCUGU | 4803 |
| | | UUAGGACC | | | GCUUC | |
| D-137 | SS-137 | CUUUCAGGGGUC | 4613 | AS-118 | UGCUUAGGACCCCU | 4804 |
| | | CUAAGCC | | | GAAAG | |
| D-138 | SS-138 | GAUAUGCCCCCC | 4614 | AS-119 | UUAAUGAGGGGGGC | 4805 |
| | | UCAUUAC | | | AUAUC | |
| D-139 | SS-139 | CUAAGGAGGCCG | 4615 | AS-120 | UGCUGAACGGCCUC | 4806 |
| | | UUCAGCC | | | CUUAG | |
| D-140 | SS-140 | GGAACACACCCC | 4616 | AS-121 | UUCCAAGGGGGUGU | 4807 |
| | | CUUGGAC | | | GUUCC | |
| D-141 | SS-141 | CCUAAGCCCACA | 4617 | AS-122 | UCAUGAUUGUGGGC | 4808 |
| | | AUCAUGC | | | UUAGG | |
| D-142 | SS-142 | CUGGGGCCUCCC | 4618 | AS-123 | UAAACUUGGGAGGC | 4809 |
| | | AAGUUUC | | | CCCAG | |
| D-143 | SS-143 | UGUCCCCCACUU | 4619 | AS-124 | UGGGUGCAAGUGGG | 4810 |
| | | GCACCCC | | | GGACA | |
| D-144 | SS-144 | AAGUUAUUACU | 4620 | AS-125 | UUAAUCAGAGUAAU | 4811 |
| | | CUGAUUAC | | | AACUU | |
| D-145 | SS-145 | AAUAGACUUAG | 4621 | AS-126 | UCAUGGGGCUAAGU | 4812 |
| | | CCCCAUGC | | | CUAUU | |
| D-146 | SS-146 | CAGUAAUGACCC | 4622 | AS-127 | UCAACCAGGGUCAU | 4813 |
| | | UGGUUGC | | | UACUG | |
| D-147 | SS-147 | GGAGGAAUGUG | 4623 | AS-128 | UUAUCUUACACAUU | 4814 |
| | | UAAGAUAC | | | CCUCC | |
| D-148 | SS-148 | CAAUCAUGCCUC | 4624 | AS-129 | UCUUAGGGAGGCAU | 4815 |
| | | CCUAAGC | | | GAUUG | |
| D-149 | SS-149 | UCCACUCAUCCA | 4625 | AS-130 | UCCCAGUUGGAUGA | 4816 |
| | | ACUGGGC | | | GUGGA | |
| D-150 | SS-150 | AGGUGCAGGCG | 4626 | AS-131 | UAUUCCUACGCCUG | 4817 |
| | | UAGGAAUC | | | CACCU | |
| D-151 | SS-151 | GAUAGGAUAUA | 4627 | AS-132 | UCAUACAGUAUAUC | 4818 |
| | | CUGUAUGC | | | CUAUC | |
| D-152 | SS-152 | UCCUAAGCCCAC | 4628 | AS-133 | UAUGAUUGUGGGCU | 4819 |
| | | AAUCAUC | | | UAGGA | |
| D-153 | SS-153 | GGCCGUUCAGCU | 4629 | AS-134 | UCGUCACAGCUGAA | 4820 |
| | | GUGACGC | | | CGGCC | |
| D-154 | SS-154 | UGGCCACAUCCA | 4630 | AS-135 | UAAAUGUUGGAUGU | 4821 |
| | | ACAUUUC | | | GGCCA | |
| D-155 | SS-155 | AGCAGGACUAU | 4631 | AS-136 | UGCCAGAAAUAGUC | 4822 |
| | | UUCUGGCC | | | CUGCU | |
| D-156 | SS-156 | AUAUGGACAUC | 4632 | AS-137 | UGCAACCAGAUGUC | 4823 |
| | | UGGUUGCC | | | CAUAU | |
| D-157 | SS-157 | ACUUGCACCCUA | 4633 | AS-138 | UACAAGCUAGGGUG | 4824 |
| | | GCUUGUC | | | CAAGU | |
| D-158 | SS-158 | GUAAAGAGGUU | 4634 | AS-139 | UGGUUAGAAACCUC | 4825 |
| | | UCUAACCC | | | UUUAC | |
| D-159 | SS-159 | GACUCACUUUAU | 4635 | AS-140 | UCUAUUGAUAAAGU | 4826 |
| | | CAAUAGC | | | GAGUC | |
| D-160 | SS-160 | AGCUGCUGACUC | 4636 | AS-141 | UUAAAGUGAGUCAG | 4827 |
| | | ACUUUAC | | | CAGCU | |
| D-161 | SS-161 | AAGGGUUACCCU | 4637 | AS-142 | UGUGCCCAGGGUAA | 4828 |
| | | GGGCACC | | | CCCUU | |
| D-162 | SS-162 | UGUAAAGAGGU | 4638 | AS-143 | UGUUAGAAACCUCU | 4829 |
| | | UUCUAACC | | | UUACA | |
| D-163 | SS-163 | UGGCUUGCGGCG | 4639 | AS-144 | UUCCUCGCGCCGCA | 4830 |
| | | CGAGGAC | | | AGCCA | |
| D-164 | SS-164 | GCCACGCUAGCU | 4640 | AS-145 | UCUCGUCAGCUAGC | 4831 |
| | | GACGAGC | | | GUGGC | |
| D-165 | SS-165 | CCCAAAGGAGGC | 4641 | AS-146 | UUUGUAAGCCUCCU | 4832 |
| | | UUACAAC | | | UUGGG | |
| D-166 | SS-166 | UGUUGUGCUAU | 4642 | AS-147 | UUCCCCCCAUAGCA | 4833 |
| | | GGGGGGAC | | | CAACA | |
| D-167 | SS-167 | GGGAACACACCC | 4643 | AS-148 | UCCAAGGGGGUGUG | 4834 |
| | | CCUUGGC | | | UUCCC | |
| D-168 | SS-168 | UUCCAAAUUGA | 4644 | AS-149 | UCCACCCAUCAAUU | 4835 |
| | | UGGGUGGC | | | UGGAA | |
| D-169 | SS-169 | ACCGGCAGCAUC | 4645 | AS-150 | UCAUGUCGAUGCUG | 4836 |
| | | GACAUGC | | | CCGGU | |
| D-170 | SS-170 | CUGGCUUGCGGC | 4646 | AS-151 | UCCUCGCGCCGCAA | 4837 |
| | | GCGAGGC | | | GCCAG | |
| D-171 | SS-171 | GUGUAAGAUAG | 4647 | AS-152 | UAUGUUAACUAUCU | 4838 |
| | | UUAACAUC | | | UACAC | |
| D-172 | SS-172 | AGGAUUAGGAC | 4648 | AS-153 | UCGCUUCAGUCCUA | 4839 |
| | | UGAAGCGC | | | AUCCU | |
| D-173 | SS-173 | AAUGUGUAAGA | 4649 | AS-154 | UUUAACUAUCUUAC | 4840 |
| | | UAGUUAAC | | | ACAUU | |
| D-174 | SS-174 | GGCCAGCCUAAG | 4650 | AS-155 | UCAUGAUCUUAGGC | 4841 |
| | | AUCAUGC | | | UGGCC | |
| D-175 | SS-175 | AGUUCCAUUUA | 4651 | AS-156 | UGUCAAUUUAAAUG | 4842 |
| | | AAUUGACC | | | GAACU | |
| D-176 | SS-176 | UCCAUUUAAAU | 4652 | AS-157 | UGAAGUCAAUUUAA | 4843 |
| | | UGACUUCC | | | AUGGA | |
| D-177 | SS-177 | CCCACCCUCACG | 4653 | AS-158 | UACACCUCGUGAGG | 4844 |
| | | AGGUGUC | | | GUGGG | |
| D-178 | SS-178 | CAUCUUAGCUUA | 4654 | AS-159 | UGAAAGCUAAGCUA | 4845 |
| | | GCUUUCC | | | AGAUG | |
| D-179 | SS-179 | ACUUAGCCCCAU | 4655 | AS-160 | UAAACUCAUGGGGC | 4846 |
| | | GAGUUUC | | | UAAGU | |
| D-180 | SS-180 | UCAUGGUUUAG | 4656 | AS-161 | UGAUCACCCUAAAC | 4847 |
| | | GGUGAUCC | | | CAUGA | |
| D-181 | SS-181 | GCCUGAAGCACA | 4657 | AS-162 | UUAAUCCUGUGCUU | 4848 |
| | | GGAUUAC | | | CAGGC | |
| D-182 | SS-182 | CAUACUGAGGG | 4658 | AS-163 | UAAUUUCACCCUCA | 4849 |
| | | UGAAAUUC | | | GUAUG | |
| D-183 | SS-183 | AAGAUCAUGGU | 4659 | AS-164 | UACCCUAAACCAUG | 4850 |
| | | UUAGGGUC | | | AUCUU | |
| D-184 | SS-184 | GGGAUCUCCCCC | 4660 | AS-165 | UCCACAAGGGGGAG | 4851 |
| | | UUGUGGC | | | AUCCC | |
| D-185 | SS-185 | GAGGAAUGUGU | 4661 | AS-166 | UCUAUCUUACACAU | 4852 |
| | | AAGAUAGC | | | UCCUC | |
| D-186 | SS-186 | AUCAUGGUUUA | 4662 | AS-167 | UAUCACCCUAAACC | 4853 |
| | | GGGUGAUC | | | AUGAU | |
| D-187 | SS-187 | CAGCAUCGACAU | 4663 | AS-168 | UUCUACCAUGUCGA | 4854 |
| | | GGUAGAC | | | UGCUG | |
| D-188 | SS-188 | GGUGCAGGCGU | 4664 | AS-169 | UUAUUCCUACGCCU | 4855 |
| | | AGGAAUAC | | | GCACC | |
| D-189 | SS-189 | AGGAAUGUGUA | 4665 | AS-170 | UACUAUCUUACACA | 4856 |
| | | AGAUAGUC | | | UUCCU | |
| D-190 | SS-190 | CAUGGUUUAGG | 4666 | AS-171 | UUGAUCACCCUAAA | 4857 |
| | | GUGAUCAC | | | CCAUG | |
| D-191 | SS-191 | UCCACCCAAGUC | 4667 | AS-172 | UGACGGCGACUUGG | 4858 |
| | | GCCGUCC | | | GUGGA | |
| D-192 | SS-192 | UCAGUAAUGACC | 4668 | AS-173 | UAACCAGGGUCAUU | 4859 |
| | | CUGGUUC | | | ACUGA | |
| D-193 | SS-193 | CUGGGACUUUA | 4669 | AS-174 | UUUAGCCCUAAAGU | 4860 |
| | | GGGCUAAC | | | CCCAG | |
| D-194 | SS-194 | CAGGCGUAGGA | 4670 | AS-175 | UUCCAUAUUCCUAC | 4861 |
| | | AUAUGGAC | | | GCCUG | |
| D-195 | SS-195 | GCAGGCGUAGG | 4671 | AS-176 | UCCAUAUUCCUACG | 4862 |
| | | AAUAUGGC | | | CCUGC | |
| D-196 | SS-196 | AGCCACGAGGUC | 4672 | AS-177 | UCGCCCCGACCUCG | 4863 |
| | | GGGGCGC | | | UGGCU | |
| D-197 | SS-197 | AAUCAUGCCUCC | 4673 | AS-178 | UUCUUAGGGAGGCA | 4864 |
| | | CUAAGAC | | | UGAUU | |
| D-198 | SS-198 | UAAGCCGUUGGC | 4674 | AS-179 | UAGAGGUGCCAACG | 4865 |
| | | ACCUCUC | | | GCUUA | |
| D-199 | SS-199 | AUCGACAUGGU | 4675 | AS-180 | UCGAGUCUACCAUG | 4866 |
| | | AGACUCGC | | | UCGAU | |
| D-200 | SS-200 | UCUUCGGUAAU | 4676 | AS-181 | UCCUCAGAAUUACC | 4867 |
| | | UCUGAGGC | | | GAAGA | |
| D-201 | SS-201 | AAGUCGCCAGUG | 4677 | AS-182 | UAGACACCACUGGC | 4868 |
| | | GUGUCUC | | | GACUU | |
| D-202 | SS-202 | AUAAAUUGAAA | 4678 | AS-183 | UCGUGCCUUUUCAA | 4869 |
| | | AGGCACGC | | | UUUAU | |
| D-203 | SS-203 | GUUAGAGGCCCU | 4679 | AS-184 | UACCCCAAGGGCCU | 4870 |
| | | UGGGGUC | | | CUAAC | |
| D-204 | SS-204 | AAUCAGGGGAU | 4680 | AS-185 | UCGCUGCGAUCCCC | 4871 |
| | | CGCAGCGC | | | UGAUU | |
| D-205 | SS-205 | UAAGAUAGUUA | 4681 | AS-186 | UCCCAUGUUAACUA | 4872 |
| | | ACAUGGGC | | | UCUUA | |
| D-206 | SS-206 | UGUAAGAUAGU | 4682 | AS-187 | UCAUGUUAACUAUC | 4873 |
| | | UAACAUGC | | | UUACA | |
| D-207 | SS-207 | CGGCCGCCUGUC | 4683 | AS-188 | UACCAAGGACAGGC | 4874 |
| | | CUUGGUC | | | GGCCG | |
| D-208 | SS-208 | UUAGAGGCCCUU | 4684 | AS-189 | UAACCCCAAGGGCC | 4875 |
| | | GGGGUUC | | | UCUAA | |
| D-209 | SS-209 | GGGAUCGCAGCG | 4685 | AS-190 | UUGUAGCCGCUGCG | 4876 |
| | | GCUACAC | | | AUCCC | |
| D-210 | SS-210 | CACGAGGUCGGG | 4686 | AS-191 | UCCUCGCCCCGACC | 4877 |
| | | GCGAGGC | | | UCGUG | |
| D-211 | SS-211 | GACUGGAAGCG | 4906 | AS-192 | UUUGUCAUCGCUUC | 4908 |
| | | AUGACAAUCU | | | CAGUCUU | |
| D-212 | SS-212 | CUUCCGCGAGAA | 4910 | AS-193 | UUUGGCGUUCUCGC | 4912 |
| | | CGCCAAUCU | | | GGAAGUU | |
| D-213 | SS-213 | GCAUCGACAUGG | 4914 | AS-194 | UAGUCUACCAUGUC | 4916 |
| | | UAGACUUCU | | | GAUGCUU | |
| D-214 | SS-214 | GCUCCUCGCAGU | 4918 | AS-195 | UAACCGAACUGCGA | 4920 |
| | | UCGGUUUCU | | | GGAGCUU | |
| D-215 | SS-215 | GGCUUUGGCUCG | 4922 | AS-196 | UAAGUCCCGAGCCA | 4924 |
| | | GGACUUUCU | | | AAGCCUU | |
| D-216 | SS-216 | GACUGGAAGCG | 4926 | AS-192 | UUUGUCAUCGCUUC | 4908 |
| | | AUGACAACCC | | | CAGUCUU | |
| D-217 | SS-217 | CUUCCGCGAGAA | 4930 | AS-193 | UUUGGCGUUCUCGC | 4912 |
| | | CGCCAACCC | | | GGAAGUU | |
| D-218 | SS-218 | GCAUCGACAUGG | 4934 | AS-194 | UAGUCUACCAUGUC | 4916 |
| | | UAGACUCCC | | | GAUGCUU | |
| D-219 | SS-219 | GCUCCUCGCAGU | 4938 | AS-195 | UAACCGAACUGCGA | 4920 |
| | | UCGGUUCCC | | | GGAGCUU | |
| D-220 | SS-220 | GGCUUUGGCUCG | 4942 | AS-196 | UAAGUCCCGAGCCA | 4924 |
| | | GGACUUCCC | | | AAGCCUU | |
| D-221 | SS-221 | GACUGGAAGCG | 4946 | AS-192 | UUUGUCAUCGCUUC | 4908 |
| | | AUGACAAACC | | | CAGUCUU | |
| D-222 | SS-222 | CUUCCGCGAGAA | 4950 | AS-193 | UUUGGCGUUCUCGC | 4912 |
| | | CGCCAAACC | | | GGAAGUU | |
| D-223 | SS-223 | GCAUCGACAUGG | 4954 | AS-194 | UAGUCUACCAUGUC | 4916 |
| | | UAGACUACC | | | GAUGCUU | |
| D-224 | SS-224 | GCUCCUCGCAGU | 4958 | AS-195 | UAACCGAACUGCGA | 4920 |
| | | UCGGUUGCC | | | GGAGCUU | |
| D-225 | SS-225 | GGCUUUGGCUCG | 4962 | AS-196 | UAAGUCCCGAGCCA | 4924 |
| | | GGACUUACC | | | AAGCCUU | |
| D-226 | SS-226 | GACUGGAAGCG | 4966 | AS-192 | UUUGUCAUCGCUUC | 4908 |
| | | AUGACAAUCC | | | CAGUCUU | |
| D-227 | SS-227 | CUUCCGCGAGAA | 4970 | AS-193 | UUUGGCGUUCUCGC | 4912 |
| | | CGCCAAUCC | | | GGAAGUU | |
| D-228 | SS-228 | GCAUCGACAUGG | 4974 | AS-194 | UAGUCUACCAUGUC | 4916 |
| | | UAGACUUCC | | | GAUGCUU | |
| D-229 | SS-229 | GCUCCUCGCAGU | 4978 | AS-195 | UAACCGAACUGCGA | 4920 |
| | | UCGGUUUCC | | | GGAGCUU | |
| D-230 | SS-230 | GGCUUUGGCUCG | 4982 | AS-196 | UAAGUCCCGAGCCA | 4924 |
| | | GGACUUUCC | | | AAGCCUU | |
| D-231 | SS-231 | GACUGGAAGGG | 4986 | AS-192 | UUUGUCAUCGCUUC | 4908 |
| | | AUGACAACCC | | | CAGUCUU | |
| D-232 | SS-232 | CUUCCGCGACAA | 4990 | AS-193 | UUUGGCGUUCUCGC | 4912 |
| | | CGCCAACCC | | | GGAAGUU | |
| D-233 | SS-233 | GCAUCGACAAGG | 4994 | AS-194 | UAGUCUACCAUGUC | 4916 |
| | | UAGACUCCC | | | GAUGCUU | |
| D-234 | SS-234 | GCUCCUCGCUGU | 4998 | AS-195 | UAACCGAACUGCGA | 4920 |
| | | UCGGUUCCC | | | GGAGCUU | |
| D-235 | SS-235 | GGCUUUGGCACG | 5002 | AS-196 | UAAGUCCCGAGCCA | 4924 |
| | | GGACUUCCC | | | AAGCCUU | |
| D-236 | SS-236 | GACUGGAAGCG | 5006 | AS-192 | UUUGUCAUCGCUUC | 4908 |
| | | AUGACAAGCC | | | CAGUCUU | |
| D-237 | SS-237 | CUUCCGCGAGAA | 5010 | AS-193 | UUUGGCGUUCUCGC | 4912 |
| | | CGCCAAGCC | | | GGAAGUU | |
| D-238 | SS-238 | GCAUCGACAUGG | 5014 | AS-194 | UAGUCUACCAUGUC | 4916 |
| | | UAGACUGCC | | | GAUGCUU | |
| D-239 | SS-239 | GGCUUUGGCUCG | 5022 | AS-196 | UAAGUCCCGAGCCA | 4924 |
| | | GGACUUGCC | | | AAGCCUU | |
| D-240 | SS-240 | CCUCGCAGUUCG | 5052 | AS-008 | UAUUAACCGAACUG | 4694 |
| | | GUUAAUU | | | CGAGG | |
| D-241 | SS-241 | CCUCGCAGUUCG | 5054 | AS-197 | UAUUAACCGAACUG | 5057 |
| | | GUUAAUUCU | | | CGAGGUU | |
| D-242 | SS-242 | CCUCGCAGUUCG | 5060 | AS-197 | UAUUAACCGAACUG | 5057 |
| | | GUUAAUCCC | | | CGAGGUU | |
| D-243 | SS-243 | CCUCGCAGUUCG | 5062 | AS-008 | UAUUAACCGAACUG | 4694 |
| | | GUUAAUA | | | CGAGG | |
| D-244 | SS-244 | CCUCGCAGUUCG | 5064 | AS-197 | UAUUAACCGAACUG | 5057 |
| | | GUUAAUACC | | | CGAGGUU | |
| D-245 | SS-245 | CCUCGCAGUUCG | 5066 | AS-197 | UAUUAACCGAACUG | 5057 |
| | | GUUAAUUCC | | | CGAGGUU | |
| D-246 | SS-246 | CCUCGCAGUACG | 5068 | AS-008 | UAUUAACCGAACUG | 4694 |
| | | GUUAAUC | | | CGAGG | |
| D-247 | SS-247 | CCUCGCAGUACG | 5070 | AS-197 | UAUUAACCGAACUG | 5057 |
| | | GUUAAUCCC | | | CGAGGUU | |
| D-248 | SS-248 | CCUCGCAGUUCG | 5072 | AS-008 | UAUUAACCGAACUG | 4694 |
| | | GUUAAUG | | | CGAGG | |
| D-249 | SS-249 | CCUCGCAGUUCG | 5074 | AS-197 | UAUUAACCGAACUG | 5057 |
| | | GUUAAUGCC | | | CGAGGUU | |
| D-250 | SS-250 | GCUUUGGCUCGG | 5077 | AS-198 | UGAAGUCCCGAGCC | 5080 |
| | | GACUUCCCC | | | AAAGCUU | |
| D-251 | SS-251 | GCUUUGGCUCGG | 5082 | AS-001 | UGAAGUCCCGAGCC | 4687 |
| | | GACUUCA | | | AAAGC | |
| D-252 | SS-252 | GCUUUGGCUCGG | 5084 | AS-198 | UGAAGUCCCGAGCC | 5080 |
| | | GACUUCACC | | | AAAGCUU | |
| D-253 | SS-253 | GCUUUGGCUCGG | 5086 | AS-001 | UGAAGUCCCGAGCC | 4687 |
| | | GACUUCU | | | AAAGC | |
| D-254 | SS-254 | GCUUUGGCUCGG | 5088 | AS-198 | UGAAGUCCCGAGCC | 5080 |
| | | GACUUCUCC | | | AAAGCUU | |
| D-255 | SS-255 | GCUUUGGCUGG | 5090 | AS-001 | UGAAGUCCCGAGCC | 4687 |
| | | GGACUUCC | | | AAAGC | |
| D-256 | SS-256 | GCUUUGGCUGG | 5092 | AS-198 | UGAAGUCCCGAGCC | 5080 |
| | | GGACUUCCCC | | | AAAGCUU | |
| D-257 | SS-257 | GCUUUGGCUCGG | 5094 | AS-001 | UGAAGUCCCGAGCC | 4687 |
| | | GACUUCG | | | AAAGC | |
| D-258 | SS-258 | GCUUUGGCUCGG | 5096 | AS-198 | UGAAGUCCCGAGCC | 5080 |
| | | GACUUCGCC | | | AAAGCUU | |
| D-259 | SS-259 | GCUUUGGCUCGG | 5098 | AS-198 | UGAAGUCCCGAGCC | 5080 |
| | | GACUUCUCU | | | AAAGCUU | |
| D-260 | SS-260 | AGCUGACCUUCC | 5101 | AS-199 | UUCUCGCGGAAGGU | 5104 |
| | | GCGAGACCC | | | CAGCUUU | |
| D-261 | SS-261 | AGCUGACCUUCC | 5106 | AS-010 | UUCUCGCGGAAGGU | 4696 |
| | | GCGAGAA | | | CAGCU | |
| D-262 | SS-262 | AGCUGACCUUCC | 5108 | AS-199 | UUCUCGCGGAAGGU | 5104 |
| | | GCGAGAACC | | | CAGCUUU | |
| D-263 | SS-263 | AGCUGACCUUCC | 5110 | AS-010 | UUCUCGCGGAAGGU | 4696 |
| | | GCGAGAU | | | CAGCU | |
| D-264 | SS-264 | AGCUGACCUUCC | 5112 | AS-199 | UUCUCGCGGAAGGU | 5104 |
| | | GCGAGAUCC | | | CAGCUUU | |
| D-265 | SS-265 | AGCUGACCUACC | 5114 | AS-010 | UUCUCGCGGAAGGU | 4696 |
| | | GCGAGAC | | | CAGCU | |
| D-266 | SS-266 | AGCUGACCUACC | 5116 | AS-199 | UUCUCGCGGAAGGU | 5104 |
| | | GCGAGACCC | | | CAGCUUU | |
| D-267 | SS-267 | AGCUGACCUUCC | 5118 | AS-010 | UUCUCGCGGAAGGU | 4696 |
| | | GCGAGAG | | | CAGCU | |
| D-268 | SS-268 | AGCUGACCUUCC | 5120 | AS-199 | UUCUCGCGGAAGGU | 5104 |
| | | GCGAGAGCC | | | CAGCUUU | |
| D-269 | SS-269 | AGCUGACCUUCC | 5122 | AS-199 | UUCUCGCGGAAGGU | 5104 |
| | | GCGAGAUCU | | | CAGCUUU | |
| D-270 | SS-270 | GCCGUCUUCCGC | 5125 | AS-200 | UCUCUUGGCGGAAG | 5128 |
| | | CAAGAGCCC | | | ACGGCUU | |
| D-271 | SS-271 | GCCGUCUUCCGC | 5130 | AS-032 | UCUCUUGGCGGAAG | 4718 |
| | | CAAGAGA | | | ACGGC | |
| D-272 | SS-272 | GCCGUCUUCCGC | 5132 | AS-200 | UCUCUUGGCGGAAG | 5128 |
| | | CAAGAGACC | | | ACGGCUU | |
| D-273 | SS-273 | GCCGUCUUCCGC | 5134 | AS-032 | UCUCUUGGCGGAAG | 4718 |
| | | CAAGAGU | | | ACGGC | |
| D-274 | SS-274 | GCCGUCUUCCGC | 5136 | AS-200 | UCUCUUGGCGGAAG | 5128 |
| | | CAAGAGUCC | | | ACGGCUU | |
| D-275 | SS-275 | GCCGUCUUCGGC | 5138 | AS-032 | UCUCUUGGCGGAAG | 4718 |
| | | CAAGAGC | | | ACGGC | |
| D-276 | SS-276 | GCCGUCUUCGGC | 5140 | AS-200 | UCUCUUGGCGGAAG | 5128 |
| | | CAAGAGCCC | | | ACGGCUU | |
| D-277 | SS-277 | GCCGUCUUCCGC | 5142 | AS-032 | UCUCUUGGCGGAAG | 4718 |
| | | CAAGAGG | | | ACGGC | |
| D-278 | SS-278 | GCCGUCUUCCGC | 5144 | AS-200 | UCUCUUGGCGGAAG | 5128 |
| | | CAAGAGGCC | | | ACGGCUU | |
| D-279 | SS-279 | GCCGUCUUCCGC | 5146 | AS-200 | UCUCUUGGCGGAAG | 5128 |
| | | CAAGAGUCU | | | ACGGCUU | |

[0647] In some embodiments, the siRNA for targeting MAPT comprises an antisense strand sequence comprising at least 15, 16, 17, 18, or 19 contiguous nucleotides differing by 3, 2, 1, or 0 nucleotides from the nucleotide sequence of SEQ ID NO: 4700. In some embodiments, the siRNA comprises a sense strand sequence comprising at least 15, 16, 17, 18, or 19 contiguous nucleotides differing by 3, 2, 1, or 0 nucleotides from the nucleotide sequence of any one of SEQ ID NOs: 4502-4505. In some embodiments, the antisense strand sequence comprises at least 15, 16, 17, 18, or 19 contiguous nucleotides differing by 3, 2, 1, or 0 nucleotides from the nucleotide sequence of SEQ ID NO: 4700 and the sense strand sequence comprises at least 15, 16, 17, 18, or 19 contiguous nucleotides differing by 3, 2, 1, or 0 nucleotides from the nucleotide sequence of any one of SEQ ID NOs: 4502-4505.

[0648] In some embodiments, the siRNA for targeting MAPT comprises an antisense strand sequence comprising at least 15, 16, 17, 18, 19, 20, or 21 contiguous nucleotides differing by 3, 2, 1, or 0 nucleotides from the nucleotide sequence of SEQ ID NO: 4920. In some embodiments, the siRNA comprises a sense strand sequence comprising at least 15, 16, 17, 18, 19, 20, or 21 contiguous nucleotides differing by 3, 2, 1, or 0 nucleotides from the nucleotide sequence of any one of SEQ ID NOs: 4918, 4938, 4958, 4978, or 4998. In some embodiments, the antisense strand sequence comprises at least 15, 16, 17, 18, 19, 20, or 21 contiguous nucleotides differing by 3, 2, 1, or 0 nucleotides from the nucleotide sequence of SEQ ID NO: 4920 and the sense strand sequence comprises at least 15, 16, 17, 18, 19, 20, or 21 contiguous nucleotides differing by 3, 2, 1, or 0 nucleotides from the nucleotide sequence of any one of SEQ ID NOs: 4918, 4938, 4958, 4978, or 4998.

[0649] In some embodiments, the siRNA for targeting MAPT comprises an antisense strand sequence comprising at least 15, 16, 17, 18, 19, 20, or 21 contiguous nucleotides differing by 3, 2, 1, or 0 nucleotides from the nucleotide sequence of SEQ ID NO: 4920. In some embodiments, the antisense strand comprises at least 20 or 21 contiguous nucleotides of SEQ ID NO: 4920. In some embodiments, the antisense strand comprises the nucleotide sequence of SEQ ID NO: 4920. In some embodiments, the siRNA comprises a sense strand sequence comprising at least 15, 16, 17, 18, 19, 20, or 21 contiguous nucleotides differing by 3, 2, 1, or 0 nucleotides from the nucleotide sequence of SEQ ID NO: 4918. In some embodiments, the sense strand sequence comprises at least 20 or 21 contiguous nucleotides of SEQ ID NO: 4918. In some embodiments, the sense strand sequence comprises the nucleotide sequence of SEQ ID NO: 4918. In some embodiments, the antisense strand sequence comprises at least 15, 16, 17, 18, 19, 20, or 21 contiguous nucleotides differing by 3, 2, 1, or 0 nucleotides from the nucleotide sequence of SEQ ID NO: 4920 and the sense strand sequence comprises at least 15, 16, 17, 18, 19, 20, or 21 contiguous nucleotides differing by 3, 2, 1, or 0 nucleotides from the nucleotide sequence of SEQ ID NO: 4918. In some embodiments, the antisense strand sequence comprises at least 20 or 21 contiguous nucleotides of SEQ ID NO: 4920; and the sense strand sequence comprises at least 20 or 21 contiguous nucleotides of SEQ ID NO: 4918. In some embodiments, the antisense strand sequence comprises the nucleotide sequence of SEQ ID NO: 4920; and the sense strand comprises the nucleotide sequence of SEQ ID NO: 4918.

[0650] In some embodiments, the nucleotide sequence encoding the antisense strand sequence comprises at least 15, 16, 17, 18, 19, 20, or 21 contiguous nucleotides differing by 3, 2, 1, or 0 nucleotides from the nucleotide sequence of SEQ ID NO: 4919. In some embodiments, the nucleotide sequence encoding the antisense strand comprises at least 20 or 21 contiguous nucleotides of SEQ ID NO: 4919. In some embodiments, the nucleotide sequence encoding the antisense strand comprises the nucleotide sequence of SEQ ID NO: 4919. In some embodiments, the nucleotide sequence encoding the sense strand sequence comprises at least 15, 16, 17, 18, 19, 20, or 21 contiguous nucleotides differing by 3, 2, 1, or 0 nucleotides from the nucleotide sequence of SEQ ID NO: 4917. In some embodiments, the nucleotide sequence encoding the sense strand sequence comprises at least 20 or 21 contiguous nucleotides of SEQ ID NO: 4917. In some embodiments, the nucleotide sequence encoding the sense strand sequence comprises the nucleotide sequence of SEQ ID NO: 4917. In some embodiments, the nucleotide sequence encoding the antisense strand sequence comprises at least 15, 16, 17, 18, 19, 20, or 21 contiguous nucleotides differing by 3, 2, 1, or 0 nucleotides from the nucleotide sequence of SEQ ID NO: 4919 and the nucleotide sequence encoding the sense strand sequence comprises at least 15, 16, 17, 18, 19, 20, or 21 contiguous nucleotides differing by 3, 2, 1, or 0 nucleotides from the nucleotide sequence of SEQ ID NO: 4917. In some embodiments, the nucleotide sequence encoding the antisense strand sequence comprises at least 20 or 21 contiguous nucleotides of SEQ ID NO: 4919; and the nucleotide sequence encoding the sense strand sequence comprises at least 20 or 21 contiguous nucleotides of SEQ ID NO: 4917. In some embodiments, the nucleotide sequence encoding the antisense strand sequence comprises the nucleotide sequence of SEQ ID NO: 4919; and the nucleotide sequence encoding the sense strand comprises the nucleotide sequence of SEQ ID NO: 4917.

[0651] In some embodiments, the siRNA for targeting MAPT comprises an antisense strand sequence comprising at least 15, 16, 17, 18, 19, 20, or 21 contiguous nucleotides differing by 3, 2, 1, or 0 nucleotides from the nucleotide sequence of SEQ ID NO: 4920. In some embodiments, the antisense strand comprises at least 20 or 21 contiguous nucleotides of SEQ ID NO: 4920. In some embodiments, the antisense strand comprises the nucleotide sequence of SEQ ID NO: 4920. In some embodiments, the siRNA comprises a sense strand sequence comprising at least 15, 16, 17, 18, 19, 20, or 21 contiguous nucleotides differing by 3, 2, 1, or 0 nucleotides from the nucleotide sequence of SEQ ID NO: 4978. In some embodiments, the sense strand sequence comprises at least 20 or 21 contiguous nucleotides of SEQ ID NO: 4978. In some embodiments, the sense strand sequence comprises the nucleotide sequence of SEQ ID NO: 4978. In some embodiments, the antisense strand sequence comprises at least 15, 16, 17, 18, 19, 20, or 21 contiguous nucleotides differing by 3, 2, 1, or 0 nucleotides from the nucleotide sequence of SEQ ID NO: 4920; and the sense strand sequence comprises at least 15, 16, 17, 18, 19, 20, or 21 contiguous nucleotides differing by 3, 2, 1, or 0 nucleotides from the nucleotide sequence of SEQ ID NO: 4978. In some embodiments, the antisense strand sequence comprises at least 20 or 21 contiguous nucleotides of SEQ ID NO: 4920; and the sense strand sequence comprises at least 20 or 21 contiguous nucleotides of SEQ ID NO: 4978. In some embodiments, the antisense strand sequence comprises the nucleotide sequence of SEQ ID NO: 4920; and the sense strand comprises the nucleotide sequence of SEQ ID NO: 4978.

[0652] In some embodiments, the nucleotide sequence encoding the antisense strand sequence comprises at least 15, 16, 17, 18, 19, 20, or 21 contiguous nucleotides differing by 3, 2, 1, or 0 nucleotides from the nucleotide sequence of SEQ ID NO: 4919. In some embodiments, the nucleotide sequence encoding the antisense strand comprises at least 20 or 21 contiguous nucleotides of SEQ ID NO: 4919. In some embodiments, the nucleotide sequence encoding the antisense strand comprises the nucleotide sequence of SEQ ID NO: 4919. In some embodiments, the nucleotide sequence encoding the sense strand sequence comprises at least 15, 16, 17, 18, 19, 20, or 21 contiguous nucleotides differing by 3, 2, 1, or 0 nucleotides from the nucleotide sequence of SEQ ID NO: 4977. In some embodiments, the nucleotide sequence encoding the sense strand sequence comprises at least 20 or 21 contiguous nucleotides of SEQ ID NO: 4977. In some embodiments, the nucleotide sequence encoding the sense strand sequence comprises the nucleotide sequence of SEQ ID NO: 4977. In some embodiments, the nucleotide sequence encoding the antisense strand sequence comprises at least 15, 16, 17, 18, 19, 20, or 21 contiguous nucleotides differing by 3, 2, 1, or 0 nucleotides from the nucleotide sequence of SEQ ID NO: 4919; and the nucleotide sequence encoding the sense strand sequence comprises at least 15, 16, 17, 18, 19, 20, or 21 contiguous nucleotides differing by 3, 2, 1, or 0 nucleotides from the nucleotide sequence of SEQ ID NO: 4977. In some embodiments, the nucleotide sequence encoding the antisense strand sequence comprises at least 20 or 21 contiguous nucleotides of SEQ ID NO: 4919; and the nucleotide sequence encoding the sense strand sequence comprises at least 20 or 21 contiguous nucleotides of SEQ ID NO: 4977. In some embodiments, the nucleotide sequence encoding the antisense strand sequence comprises the nucleotide sequence of SEQ ID NO: 4919; and the nucleotide sequence encoding the sense strand comprises the nucleotide sequence of SEQ ID NO: 4977.

[0653] In some embodiments, the siRNA for targeting MAPT comprises an antisense strand sequence comprising at least 15, 16, 17, 18, or 19 contiguous nucleotides differing by 3, 2, 1, or 0 nucleotides from the nucleotide sequence of SEQ ID NO: 4697. In some embodiments, the siRNA comprises a sense strand sequence comprising at least 15, 16, 17, 18, or 19 contiguous nucleotides differing by 3, 2, 1, or 0 nucleotides from the nucleotide sequence of any one of SEQ ID NOs: 4495-4499. In some embodiments, the antisense strand sequence comprises at least 15, 16, 17, 18, or 19 contiguous nucleotides differing by 3, 2, 1, or 0 nucleotides from the nucleotide sequence of SEQ ID NO: 4697 and the sense strand sequence comprises at least 15, 16, 17, 18, or 19 contiguous nucleotides differing by 3, 2, 1, or 0 nucleotides from the nucleotide sequence of any one of SEQ ID NOs: 4495-4499.

[0654] In some embodiments, the siRNA for targeting MAPT comprises an antisense strand sequence comprising at least 15, 16, 17, 18, 19, 20, or 21 contiguous nucleotides differing by 3, 2, 1, or 0 nucleotides from the nucleotide sequence of SEQ ID NO: 4908. In some embodiments, the siRNA comprises a sense strand sequence comprising at least 15, 16, 17, 18, 19, 20, or 21 contiguous nucleotides differing by 3, 2, 1, or 0 nucleotides from the nucleotide sequence of any one of SEQ ID NOs: 4906, 4926, 4946, 4966, 4986, or 5006. In some embodiments, the antisense strand sequence comprises at least 15, 16, 17, 18, 19, 20, or 21 contiguous nucleotides differing by 3, 2, 1, or 0 nucleotides from the nucleotide sequence of SEQ ID NO: 4908 and the sense strand sequence comprises at least 15, 16, 17, 18, 19, 20, or 21 contiguous nucleotides differing by 3, 2, 1, or 0 nucleotides from the nucleotide sequence of any one of SEQ ID NOs: 4906, 4926, 4946, 4966, 4986, or 5006.

[0655] In some embodiments, the siRNA for targeting MAPT comprises an antisense strand sequence comprising at least 15, 16, 17, 18, 19, 20, or 21 contiguous nucleotides differing by 3, 2, 1, or 0 nucleotides from the nucleotide sequence of SEQ ID NO: 4908. In some embodiments, the antisense strand comprises at least 20 or 21 contiguous nucleotides of SEQ ID NO: 4908. In some embodiments, the antisense strand comprises the nucleotide sequence of SEQ ID NO: 4908. In some embodiments, the siRNA comprises a sense strand sequence comprising at least 15, 16, 17, 18, 19, 20, or 21 contiguous nucleotides differing by 3, 2, 1, or 0 nucleotides from the nucleotide sequence of SEQ ID NO: 4906. In some embodiments, the sense strand sequence comprises at least 20 or 21 contiguous nucleotides of SEQ ID NO: 4906. In some embodiments, the sense strand sequence comprises the nucleotide sequence of SEQ ID NO: 4906. In some embodiments, the antisense strand sequence comprises at least 15, 16, 17, 18, 19, 20, or 21 contiguous nucleotides differing by 3, 2, 1, or 0 nucleotides from the nucleotide sequence of SEQ ID NO: 4908; and the sense strand sequence comprises at least 15, 16, 17, 18, 19, 20, or 21 contiguous nucleotides differing by 3, 2, 1, or 0 nucleotides from the nucleotide sequence of SEQ ID NO: 4906. In some embodiments, the antisense strand sequence comprises at least 20 or 21 contiguous nucleotides of SEQ ID NO: 4908; and the sense strand sequence comprises at least 20 or 21 contiguous nucleotides of SEQ ID NO: 4906. In some embodiments, the antisense strand sequence comprises the nucleotide sequence of SEQ ID NO: 4908; and the sense strand comprises the nucleotide sequence of SEQ ID NO: 4906.

[0656] In some embodiments, the nucleotide sequence encoding the antisense strand sequence comprises at least 15, 16, 17, 18, 19, 20, or 21 contiguous nucleotides differing by 3, 2, 1, or 0 nucleotides from the nucleotide sequence of SEQ ID NO: 4907. In some embodiments, the nucleotide sequence encoding the antisense strand comprises at least 20 or 21 contiguous nucleotides of SEQ ID NO: 4907. In some embodiments, the nucleotide sequence encoding the antisense strand comprises the nucleotide sequence of SEQ ID NO: 4907. In some embodiments, the nucleotide sequence encoding the sense strand sequence comprises at least 15, 16, 17, 18, 19, 20, or 21 contiguous nucleotides differing by 3, 2, 1, or 0 nucleotides from the nucleotide sequence of SEQ ID NO: 4905. In some embodiments, the nucleotide sequence encoding the sense strand sequence comprises at least 20 or 21 contiguous nucleotides of SEQ ID NO: 4905. In some embodiments, the nucleotide sequence encoding the sense strand sequence comprises the nucleotide sequence of SEQ ID NO: 4905. In some embodiments, the nucleotide sequence encoding the antisense strand sequence comprises at least 15, 16, 17, 18, 19, 20, or 21 contiguous nucleotides differing by 3, 2, 1, or 0 nucleotides from the nucleotide sequence of SEQ ID NO: 4907; and the nucleotide sequence encoding the sense strand sequence comprises at least 15, 16, 17, 18, 19, 20, or 21 contiguous nucleotides differing by 3, 2, 1, or 0 nucleotides from the nucleotide sequence of SEQ ID NO: 4905. In some embodiments, the nucleotide sequence encoding the antisense strand sequence comprises at least 20 or 21 contiguous nucleotides of SEQ ID NO: 4907; and the nucleotide sequence encoding the sense strand sequence comprises at least 20 or 21 contiguous nucleotides of SEQ ID NO: 4905. In some embodiments, the nucleotide sequence encoding the antisense strand sequence comprises the nucleotide sequence of SEQ ID NO: 4907; and the nucleotide sequence encoding the sense strand comprises the nucleotide sequence of SEQ ID NO: 4905.

[0657] In some embodiments, the siRNA for targeting MAPT comprises an antisense strand sequence comprising at least 15, 16, 17, 18, 19, 20, or 21 contiguous nucleotides differing by 3, 2, 1, or 0 nucleotides from the nucleotide sequence of SEQ ID NO: 4908. In some embodiments, the antisense strand comprises at least 20 or 21 contiguous nucleotides of SEQ ID NO: 4908. In some embodiments, the antisense strand comprises the nucleotide sequence of SEQ ID NO: 4908. In some embodiments, the siRNA comprises a sense strand sequence comprising at least 15, 16, 17, 18, 19, 20, or 21 contiguous nucleotides differing by 3, 2, 1, or 0 nucleotides from the nucleotide sequence of SEQ ID NO: 4966. In some embodiments, the sense strand sequence comprises at least 20 or 21 contiguous nucleotides of SEQ ID NO: 4966. In some embodiments, the sense strand sequence comprises the nucleotide sequence of SEQ ID NO: 4966. In some embodiments, the antisense strand sequence comprises at least 15, 16, 17, 18, 19, 20, or 21 contiguous nucleotides differing by 3, 2, 1, or 0 nucleotides from the nucleotide sequence of SEQ ID NO: 4908 and the sense strand sequence comprises at least 15, 16, 17, 18, 19, 20, or 21 contiguous nucleotides differing by 3, 2, 1, or 0 nucleotides from the nucleotide sequence of SEQ ID NO: 4966. In some embodiments, the antisense strand sequence comprises at least 20 or 21 contiguous nucleotides of SEQ ID NO: 4908; and the sense strand sequence comprises at least 20 or 21 contiguous nucleotides of SEQ ID NO: 4966. In some embodiments, the antisense strand sequence comprises the nucleotide sequence of SEQ ID NO: 4908; and the sense strand comprises the nucleotide sequence of SEQ ID NO: 4966.

[0658] In some embodiments, the nucleotide sequence encoding the antisense strand sequence comprises at least 15, 16, 17, 18, 19, 20, or 21 contiguous nucleotides differing by 3, 2, 1, or 0 nucleotides from the nucleotide sequence of SEQ ID NO: 4907. In some embodiments, the nucleotide sequence encoding the antisense strand comprises at least 20 or 21 contiguous nucleotides of SEQ ID NO: 4907. In some embodiments, the nucleotide sequence encoding the antisense strand comprises the nucleotide sequence of SEQ ID NO: 4907. In some embodiments, the nucleotide sequence encoding the sense strand sequence comprises at least 15, 16, 17, 18, 19, 20, or 21 contiguous nucleotides differing by 3, 2, 1, or 0 nucleotides from the nucleotide sequence of SEQ ID NO: 4965. In some embodiments, the nucleotide sequence encoding the sense strand sequence comprises at least 20 or 21 contiguous nucleotides of SEQ ID NO: 4965. In some embodiments, the nucleotide sequence encoding the sense strand sequence comprises the nucleotide sequence of SEQ ID NO: 4965. In some embodiments, the nucleotide sequence encoding the antisense strand sequence comprises at least 15, 16, 17, 18, 19, 20, or 21 contiguous nucleotides differing by 3, 2, 1, or 0 nucleotides from the nucleotide sequence of SEQ ID NO: 4907; and the nucleotide sequence encoding the sense strand sequence comprises at least 15, 16, 17, 18, 19, 20, or 21 contiguous nucleotides differing by 3, 2, 1, or 0 nucleotides from the nucleotide sequence of SEQ ID NO: 4965. In some embodiments, the nucleotide sequence encoding the antisense strand sequence comprises at least 20 or 21 contiguous nucleotides of SEQ ID NO: 4907; and the nucleotide sequence encoding the sense strand sequence comprises at least 20 or 21 contiguous nucleotides of SEQ ID NO: 4965. In some embodiments, the nucleotide sequence encoding the antisense strand sequence comprises the nucleotide sequence of SEQ ID NO: 4907; and the nucleotide sequence encoding the sense strand comprises the nucleotide sequence of SEQ ID NO: 4965.

[0659] In some embodiments, the siRNA for targeting MAPT comprises an antisense strand sequence comprising at least 15, 16, 17, 18, or 19 contiguous nucleotides differing by 3, 2, 1, or 0 nucleotides from the nucleotide sequence of SEQ ID NO: 4690. In some embodiments, the siRNA comprises a sense strand sequence comprising at least 15, 16, 17, 18, or 19 contiguous nucleotides differing by 3, 2, 1, or 0 nucleotides from the nucleotide sequence of any one of SEQ ID NOs: 4480-4484. In some embodiments, the antisense strand sequence comprises at least 15, 16, 17, 18, or 19 contiguous nucleotides differing by 3, 2, 1, or 0 nucleotides from the nucleotide sequence of SEQ ID NO: 4690 and the sense strand sequence comprises at least 15, 16, 17, 18, or 19 contiguous nucleotides differing by 3, 2, 1, or 0 nucleotides from the nucleotide sequence of any one of SEQ ID NOs: 4480-4484.

[0660] In some embodiments, the siRNA for targeting MAPT comprises an antisense strand sequence comprising at least 15, 16, 17, 18, 19, 20, or 21 contiguous nucleotides differing by 3, 2, 1, or 0 nucleotides from the nucleotide sequence of SEQ ID NO: 4924. In some embodiments, the siRNA comprises a sense strand sequence comprising at least 15, 16, 17, 18, 19, 20, or 21 contiguous nucleotides differing by 3, 2, 1, or 0 nucleotides from the nucleotide sequence of any one of SEQ ID NOs: 4922, 4942, 4962, 4982, 5002, or 5022. In some embodiments, the antisense strand sequence comprises at least 15, 16, 17, 18, 19, 20, or 21 contiguous nucleotides differing by 3, 2, 1, or 0 nucleotides from the nucleotide sequence of SEQ ID NO: 4924 and the sense strand sequence comprises at least 15, 16, 17, 18, 19, 20, or 21 contiguous nucleotides differing by 3, 2, 1, or 0 nucleotides from the nucleotide sequence of any one of SEQ ID NOs: 4922, 4942, 4962, 4982, 5002, or 5022.

[0661] In some embodiments, the siRNA for targeting MAPT comprises an antisense strand sequence comprising at least 15, 16, 17, 18, 19, 20, or 21 contiguous nucleotides differing by 3, 2, 1, or 0 nucleotides from the nucleotide sequence of SEQ ID NO: 4924. In some embodiments, the antisense strand comprises at least 20 or 21 contiguous nucleotides of SEQ ID NO: 4924. In some embodiments, the antisense strand comprises the nucleotide sequence of SEQ ID NO: 4924. In some embodiments, the siRNA comprises a sense strand sequence comprising at least 15, 16, 17, 18, 19, 20, or 21 contiguous nucleotides differing by 3, 2, 1, or 0 nucleotides from the nucleotide sequence of SEQ ID NO: 4922. In some embodiments, the sense strand sequence comprises at least 20 or 21 contiguous nucleotides of SEQ ID NO: 4922. In some embodiments, the sense strand sequence comprises the nucleotide sequence of SEQ ID NO: 4922. In some embodiments, the antisense strand sequence comprises at least 15, 16, 17, 18, 19, 20, or 21 contiguous nucleotides differing by 3, 2, 1, or 0 nucleotides from the nucleotide sequence of SEQ ID NO: 4924; and the sense strand sequence comprises at least 15, 16, 17, 18, 19, 20, or 21 contiguous nucleotides differing by 3, 2, 1, or 0 nucleotides from the nucleotide sequence of SEQ ID NO: 4922. In some embodiments, the antisense strand sequence comprises at least 20 or 21 contiguous nucleotides of SEQ ID NO: 4924; and the sense strand sequence comprises at least 20 or 21 contiguous nucleotides of SEQ ID NO: 4922. In some embodiments, the antisense strand sequence comprises the nucleotide sequence of SEQ ID NO: 4924; and the sense strand comprises the nucleotide sequence of SEQ ID NO: 4922.

[0662] In some embodiments, the nucleotide sequence encoding the antisense strand sequence comprises at least 15, 16, 17, 18, 19, 20, or 21 contiguous nucleotides differing by 3, 2, 1, or 0 nucleotides from the nucleotide sequence of SEQ ID NO: 4923. In some embodiments, the nucleotide sequence encoding the antisense strand comprises at least 20 or 21 contiguous nucleotides of SEQ ID NO: 4923. In some embodiments, the nucleotide sequence encoding the antisense strand comprises the nucleotide sequence of SEQ ID NO: 4923. In some embodiments, the nucleotide sequence encoding the sense strand sequence comprises at least 15, 16, 17, 18, 19, 20, or 21 contiguous nucleotides differing by 3, 2, 1, or 0 nucleotides from the nucleotide sequence of SEQ ID NO: 4921. In some embodiments, the nucleotide sequence encoding the sense strand sequence comprises at least 20 or 21 contiguous nucleotides of SEQ ID NO: 4921. In some embodiments, the nucleotide sequence encoding the sense strand sequence comprises the nucleotide sequence of SEQ ID NO: 4921. In some embodiments, the nucleotide sequence encoding the antisense strand sequence comprises at least 15, 16, 17, 18, 19, 20, or 21 contiguous nucleotides differing by 3, 2, 1, or 0 nucleotides from the nucleotide sequence of SEQ ID NO: 4923; and the nucleotide sequence encoding the sense strand sequence comprises at least 15, 16, 17, 18, 19, 20, or 21 contiguous nucleotides differing by 3, 2, 1, or 0 nucleotides from the nucleotide sequence of SEQ ID NO: 4921. In some embodiments, the nucleotide sequence encoding the antisense strand sequence comprises at least 20 or 21 contiguous nucleotides of SEQ ID NO: 4923; and the nucleotide sequence encoding the sense strand sequence comprises at least 20 or 21 contiguous nucleotides of SEQ ID NO: 4921. In some embodiments, the nucleotide sequence encoding the antisense strand sequence comprises the nucleotide sequence of SEQ ID NO: 4923; and the nucleotide sequence encoding the sense strand comprises the nucleotide sequence of SEQ ID NO: 4921.

[0663] In some embodiments, the siRNA for targeting MAPT comprises an antisense strand sequence comprising at least 15, 16, 17, 18, 19, 20, or 21 contiguous nucleotides differing by 3, 2, 1, or 0 nucleotides from the nucleotide sequence of SEQ ID NO: 4924. In some embodiments, the antisense strand comprises at least 20 or 21 contiguous nucleotides of SEQ ID NO: 4924. In some embodiments, the antisense strand comprises the nucleotide sequence of SEQ ID NO: 4924. In some embodiments, the siRNA comprises a sense strand sequence comprising at least 15, 16, 17, 18, 19, 20, or 21 contiguous nucleotides differing by 3, 2, 1, or 0 nucleotides from the nucleotide sequence of SEQ ID NO: 4982. In some embodiments, the sense strand sequence comprises at least 20 or 21 contiguous nucleotides of SEQ ID NO: 4982. In some embodiments, the sense strand sequence comprises the nucleotide sequence of SEQ ID NO: 4982. In some embodiments, the antisense strand sequence comprises at least 15, 16, 17, 18, 19, 20, or 21 contiguous nucleotides differing by 3, 2, 1, or 0 nucleotides from the nucleotide sequence of SEQ ID NO: 4924; and the sense strand sequence comprises at least 15, 16, 17, 18, 19, 20, or 21 contiguous nucleotides differing by 3, 2, 1, or 0 nucleotides from the nucleotide sequence of SEQ ID NO: 4982. In some embodiments, the antisense strand sequence comprises at least 20 or 21 contiguous nucleotides of SEQ ID NO: 4924; and the sense strand sequence comprises at least 20 or 21 contiguous nucleotides of SEQ ID NO: 4982. In some embodiments, the antisense strand sequence comprises the nucleotide sequence of SEQ ID NO: 4924; and the sense strand comprises the nucleotide sequence of SEQ ID NO: 4982.

[0664] In some embodiments, the nucleotide sequence encoding the antisense strand sequence comprises at least 15, 16, 17, 18, 19, 20, or 21 contiguous nucleotides differing by 3, 2, 1, or 0 nucleotides from the nucleotide sequence of SEQ ID NO: 4923. In some embodiments, the nucleotide sequence encoding the antisense strand comprises at least 20 or 21 contiguous nucleotides of SEQ ID NO: 4923. In some embodiments, the nucleotide sequence encoding the antisense strand comprises the nucleotide sequence of SEQ ID NO: 4923. In some embodiments, the nucleotide sequence encoding the sense strand sequence comprises at least 15, 16, 17, 18, 19, 20, or 21 contiguous nucleotides differing by 3, 2, 1, or 0 nucleotides from the nucleotide sequence of SEQ ID NO: 4981. In some embodiments, the nucleotide sequence encoding the sense strand sequence comprises at least 20 or 21 contiguous nucleotides of SEQ ID NO: 4981. In some embodiments, the nucleotide sequence encoding the sense strand sequence comprises the nucleotide sequence of SEQ ID NO: 4981. In some embodiments, the nucleotide sequence encoding the antisense strand sequence comprises at least 15, 16, 17, 18, 19, 20, or 21 contiguous nucleotides differing by 3, 2, 1, or 0 nucleotides from the nucleotide sequence of SEQ ID NO: 4923; and the nucleotide sequence encoding the sense strand sequence comprises at least 15, 16, 17, 18, 19, 20, or 21 contiguous nucleotides differing by 3, 2, 1, or 0 nucleotides from the nucleotide sequence of SEQ ID NO: 4981. In some embodiments, the nucleotide sequence encoding the antisense strand sequence comprises at least 20 or 21 contiguous nucleotides of SEQ ID NO: 4923; and the nucleotide sequence encoding the sense strand sequence comprises at least 20 or 21 contiguous nucleotides of SEQ ID NO: 4981. In some embodiments, the nucleotide sequence encoding the antisense strand sequence comprises the nucleotide sequence of SEQ ID NO: 4923; and the nucleotide sequence encoding the sense strand comprises the nucleotide sequence of SEQ ID NO: 4981.

[0665] In some embodiments, the siRNA for targeting MAPT comprises an antisense strand sequence comprising at least 15, 16, 17, 18, or 19 contiguous nucleotides differing by 3, 2, 1, or 0 nucleotides from the nucleotide sequence of SEQ ID NO: 4694. In some embodiments, the siRNA comprises a sense strand sequence comprising at least 15, 16, 17, 18, or 19 contiguous nucleotides differing by 3, 2, 1, or 0 nucleotides from the nucleotide sequence of any one of SEQ ID NOs: 4492, 5052, 5062, 5068, or 5072. In some embodiments, the antisense strand sequence comprises at least 15, 16, 17, 18, or 19 contiguous nucleotides differing by 3, 2, 1, or 0 nucleotides from the nucleotide sequence of SEQ ID NO: 4694 and the sense strand sequence comprises at least 15, 16, 17, 18, or 19 contiguous nucleotides differing by 3, 2, 1, or 0 nucleotides from the nucleotide sequence of any one of SEQ ID NOs: 4492, 5052, 5062, 5068, or 5072.

[0666] In some embodiments, the siRNA for targeting MAPT comprises an antisense strand sequence comprising at least 15, 16, 17, 18, 19, 20, or 21 contiguous nucleotides differing by 3, 2, 1, or 0 nucleotides from the nucleotide sequence of SEQ ID NO: 5057. In some embodiments, the siRNA comprises a sense strand sequence comprising at least 15, 16, 17, 18, 19, 20, or 21 contiguous nucleotides differing by 3, 2, 1, or 0 nucleotides from the nucleotide sequence of any one of SEQ ID NOs: 5054, 5060, 5064, 5066, 5070, or 5074. In some embodiments, the antisense strand sequence comprises at least 15, 16, 17, 18, 19, 20, or 21 contiguous nucleotides differing by 3, 2, 1, or 0 nucleotides from the nucleotide sequence of SEQ ID NO: 5057; and the sense strand sequence comprises at least 15, 16, 17, 18, 19, 20, or 21 contiguous nucleotides differing by 3, 2, 1, or 0 nucleotides from the nucleotide sequence of any one of SEQ ID NOs: 5054, 5060, 5064, 5066, 5070, or 5074.

[0667] In some embodiments, the siRNA for targeting MAPT comprises an antisense strand sequence comprising at least 15, 16, 17, 18, or 19 contiguous nucleotides differing by 3, 2, 1, or 0 nucleotides from the nucleotide sequence of SEQ ID NO: 4691. In some embodiments, the siRNA comprises a sense strand sequence comprising at least 15, 16, 17, 18, or 19 contiguous nucleotides differing by 3, 2, 1, or 0 nucleotides from the nucleotide sequence of any one of SEQ ID NOs: 4485-4489. In some embodiments, the antisense strand sequence comprises at least 15, 16, 17, 18, or 19 contiguous nucleotides differing by 3, 2, 1, or 0 nucleotides from the nucleotide sequence of SEQ ID NO: 4691 and the sense strand sequence comprises at least 15, 16, 17, 18, or 19 contiguous nucleotides differing by 3, 2, 1, or 0 nucleotides from the nucleotide sequence of any one of SEQ ID NOs: 4485-4489.

[0668] In some embodiments, the siRNA for targeting MAPT comprises an antisense strand sequence comprising at least 15, 16, 17, 18, 19, 20, or 21 contiguous nucleotides differing by 3, 2, 1, or 0 nucleotides from the nucleotide sequence of SEQ ID NO: 4916. In some embodiments, the siRNA comprises a sense strand sequence comprising at least 15, 16, 17, 18, 19, 20, or 21 contiguous nucleotides differing by 3, 2, 1, or 0 nucleotides from the nucleotide sequence of any one of SEQ ID NOs: 4914, 4934, 4954, 4974, 4994, or 5014. In some embodiments, the antisense strand sequence comprises at least 15, 16, 17, 18, 19, 20, or 21 contiguous nucleotides differing by 3, 2, 1, or 0 nucleotides from the nucleotide sequence of SEQ ID NO: 4916 and the sense strand sequence comprises at least 15, 16, 17, 18, 19, 20, or 21 contiguous nucleotides differing by 3, 2, 1, or 0 nucleotides from the nucleotide sequence of any one of SEQ ID NOs: 4914, 4934, 4954, 4974, 4994, or 5014.

[0669] In some embodiments, the siRNA for targeting MAPT comprises an antisense strand sequence comprising at least 15, 16, 17, 18, or 19 contiguous nucleotides differing by 3, 2, 1, or 0 nucleotides from the nucleotide sequence of SEQ ID NO: 4701. In some embodiments, the siRNA comprises a sense strand sequence comprising at least 15, 16, 17, 18, or 19 contiguous nucleotides differing by 3, 2, 1, or 0 nucleotides from the nucleotide sequence of any one of SEQ ID NOs: 4506-4510. In some embodiments, the antisense strand sequence comprises at least 15, 16, 17, 18, or 19 contiguous nucleotides differing by 3, 2, 1, or 0 nucleotides from the nucleotide sequence of SEQ ID NO: 4701 and the sense strand sequence comprises at least 15, 16, 17, 18, or 19 contiguous nucleotides differing by 3, 2, 1, or 0 nucleotides from the nucleotide sequence of any one of SEQ ID NOs: 4506-4510.

[0670] In some embodiments, the siRNA for targeting MAPT comprises an antisense strand sequence comprising at least 15, 16, 17, 18, 19, 20, or 21 contiguous nucleotides differing by 3, 2, 1, or 0 nucleotides from the nucleotide sequence of SEQ ID NO: 4912. In some embodiments, the siRNA comprises a sense strand sequence comprising at least 15, 16, 17, 18, 19, 20, or 21 contiguous nucleotides differing by 3, 2, 1, or 0 nucleotides from the nucleotide sequence of any one of SEQ ID NOs: 4910, 4930, 4950, 4970, 4990, or 5010. In some embodiments, the antisense strand sequence comprises at least 15, 16, 17, 18, 19, 20, or 21 contiguous nucleotides differing by 3, 2, 1, or 0 nucleotides from the nucleotide sequence of SEQ ID NO: 4912 and the sense strand sequence comprises at least 15, 16, 17, 18, 19, 20, or 21 contiguous nucleotides differing by 3, 2, 1, or 0 nucleotides from the nucleotide sequence of any one of SEQ ID NOs: 4910, 4930, 4950, 4970, 4990, or 5010.

[0671] In some embodiments, the siRNA for targeting MAPT comprises an antisense strand sequence comprising at least 15, 16, 17, 18, 19, 20, or 21 contiguous nucleotides differing by 3, 2, 1, or 0 nucleotides from the nucleotide sequence of SEQ ID NO: 4912. In some embodiments, the antisense strand comprises at least 20 or 21 contiguous nucleotides of SEQ ID NO: 4912. In some embodiments, the antisense strand comprises the nucleotide sequence of SEQ ID NO: 4912. In some embodiments, the siRNA comprises a sense strand sequence comprising at least 15, 16, 17, 18, 19, 20, or 21 contiguous nucleotides differing by 3, 2, 1, or 0 nucleotides from the nucleotide sequence of SEQ ID NO: 4970. In some embodiments, the sense strand sequence comprises at least 20 or 21 contiguous nucleotides of SEQ ID NO: 4970. In some embodiments, the sense strand sequence comprises the nucleotide sequence of SEQ ID NO: 4970. In some embodiments, the antisense strand sequence comprises at least 15, 16, 17, 18, 19, 20, or 21 contiguous nucleotides differing by 3, 2, 1, or 0 nucleotides from the nucleotide sequence of SEQ ID NO: 4912; and the sense strand sequence comprises at least 15, 16, 17, 18, 19, 20, or 21 contiguous nucleotides differing by 3, 2, 1, or 0 nucleotides from the nucleotide sequence of SEQ ID NO: 4970. In some embodiments, the antisense strand sequence comprises at least 20 or 21 contiguous nucleotides of SEQ ID NO: 4912; and the sense strand sequence comprises at least 20 or 21 contiguous nucleotides of SEQ ID NO: 4970. In some embodiments, the antisense strand sequence comprises the nucleotide sequence of SEQ ID NO: 4912; and the sense strand comprises the nucleotide sequence of SEQ ID NO: 4970.

[0672] In some embodiments, the nucleotide sequence encoding the antisense strand sequence comprises at least 15, 16, 17, 18, 19, 20, or 21 contiguous nucleotides differing by 3, 2, 1, or 0 nucleotides from the nucleotide sequence of SEQ ID NO: 4911. In some embodiments, the nucleotide sequence encoding the antisense strand comprises at least 20 or 21 contiguous nucleotides of SEQ ID NO: 4911. In some embodiments, the nucleotide sequence encoding the antisense strand comprises the nucleotide sequence of SEQ ID NO: 4911. In some embodiments, the nucleotide sequence encoding the sense strand sequence comprises at least 15, 16, 17, 18, 19, 20, or 21 contiguous nucleotides differing by 3, 2, 1, or 0 nucleotides from the nucleotide sequence of SEQ ID NO: 4969. In some embodiments, the nucleotide sequence encoding the sense strand sequence comprises at least 20 or 21 contiguous nucleotides of SEQ ID NO: 4969. In some embodiments, the nucleotide sequence encoding the sense strand sequence comprises the nucleotide sequence of SEQ ID NO: 4969. In some embodiments, the nucleotide sequence encoding the antisense strand sequence comprises at least 15, 16, 17, 18, 19, 20, or 21 contiguous nucleotides differing by 3, 2, 1, or 0 nucleotides from the nucleotide sequence of SEQ ID NO: 4911; and the nucleotide sequence encoding the sense strand sequence comprises at least 15, 16, 17, 18, 19, 20, or 21 contiguous nucleotides differing by 3, 2, 1, or 0 nucleotides from the nucleotide sequence of SEQ ID NO: 4969. In some embodiments, the nucleotide sequence encoding the antisense strand sequence comprises at least 20 or 21 contiguous nucleotides of SEQ ID NO: 4911; and the nucleotide sequence encoding the sense strand sequence comprises at least 20 or 21 contiguous nucleotides of SEQ ID NO: 4969. In some embodiments, the nucleotide sequence encoding the antisense strand sequence comprises the nucleotide sequence of SEQ ID NO: 4911; and the nucleotide sequence encoding the sense strand comprises the nucleotide sequence of SEQ ID NO: 4969.

[0673] In some embodiments, the siRNA for targeting MAPT comprises an antisense strand sequence comprising at least 15, 16, 17, 18, or 19 contiguous nucleotides differing by 3, 2, 1, or 0 nucleotides from the nucleotide sequence of SEQ ID NO: 4687. In some embodiments, the siRNA comprises a sense strand sequence comprising at least 15, 16, 17, 18, or 19 contiguous nucleotides differing by 3, 2, 1, or 0 nucleotides from the nucleotide sequence of any one of SEQ ID NOs: 4477, 5082, 5086, 5090, 5094, or 5086. In some embodiments, the antisense strand sequence comprises at least 15, 16, 17, 18, or 19 contiguous nucleotides differing by 3, 2, 1, or 0 nucleotides from the nucleotide sequence of SEQ ID NO: 4687 and the sense strand sequence comprises at least 15, 16, 17, 18, or 19 contiguous nucleotides differing by 3, 2, 1, or 0 nucleotides from the nucleotide sequence of any one of SEQ ID NOs: 4477, 5082, 5086, 5090, 5094, or 5086.

[0674] In some embodiments, the siRNA for targeting MAPT comprises an antisense strand sequence comprising at least 15, 16, 17, 18, 19, 20, or 21 contiguous nucleotides differing by 3, 2, 1, or 0 nucleotides from the nucleotide sequence of SEQ ID NO: 5080. In some embodiments, the siRNA comprises a sense strand sequence comprising at least 15, 16, 17, 18, 19, 20, or 21 contiguous nucleotides differing by 3, 2, 1, or 0 nucleotides from the nucleotide sequence of any one of SEQ ID NOs: 5077, 5084, 5088, 5092, 5096, or 5098. In some embodiments, the antisense strand sequence comprises at least 15, 16, 17, 18, 19, 20, or 21 contiguous nucleotides differing by 3, 2, 1, or 0 nucleotides from the nucleotide sequence of SEQ ID NO: 5080; and the sense strand sequence comprises at least 15, 16, 17, 18, 19, 20, or 21 contiguous nucleotides differing by 3, 2, 1, or 0 nucleotides from the nucleotide sequence of any one of SEQ ID NOs: 5077, 5084, 5088, 5092, 5096, or 5098.

[0675] In some embodiments, the siRNA for targeting MAPT comprises an antisense strand sequence comprising at least 15, 16, 17, 18, or 19 contiguous nucleotides differing by 3, 2, 1, or 0 nucleotides from the nucleotide sequence of SEQ ID NO: 4712. In some embodiments, the siRNA comprises a sense strand sequence comprising at least 15, 16, 17, 18, or 19 contiguous nucleotides differing by 3, 2, 1, or 0 nucleotides from the nucleotide sequence of SEQ ID NO: 4521. In some embodiments, the antisense strand sequence comprises at least 15, 16, 17, 18, or 19 contiguous nucleotides differing by 3, 2, 1, or 0 nucleotides from the nucleotide sequence of SEQ ID NO: 4712 and the sense strand sequence comprises at least 15, 16, 17, 18, or 19 contiguous nucleotides differing by 3, 2, 1, or 0 nucleotides from the nucleotide sequence of SEQ ID NO: 4521.

[0676] In some embodiments, the siRNA for targeting MAPT comprises an antisense strand sequence comprising at least 15, 16, 17, 18, or 19 contiguous nucleotides differing by 3, 2, 1, or 0 nucleotides from the nucleotide sequence of SEQ ID NO: 4696. In some embodiments, the siRNA comprises a sense strand sequence comprising at least 15, 16, 17, 18, or 19 contiguous nucleotides differing by 3, 2, 1, or 0 nucleotides from the nucleotide sequence of any one of SEQ ID NOs: 4494, 5106, 5110, 5114, or 5118. In some embodiments, the antisense strand sequence comprises at least 15, 16, 17, 18, or 19 contiguous nucleotides differing by 3, 2, 1, or 0 nucleotides from the nucleotide sequence of SEQ ID NO: 4696 and the sense strand sequence comprises at least 15, 16, 17, 18, or 19 contiguous nucleotides differing by 3, 2, 1, or 0 nucleotides from the nucleotide sequence of any one of SEQ ID NOs: 4494, 5106, 5110, 5114, or 5118.

[0677] In some embodiments, the siRNA for targeting MAPT comprises an antisense strand sequence comprising at least 15, 16, 17, 18, 19, 20, or 21 contiguous nucleotides differing by 3, 2, 1, or 0 nucleotides from the nucleotide sequence of SEQ ID NO: 5104. In some embodiments, the siRNA comprises a sense strand sequence comprising at least 15, 16, 17, 18, 19, 20, or 21 contiguous nucleotides differing by 3, 2, 1, or 0 nucleotides from the nucleotide sequence of any one of SEQ ID NOs: 5101, 5108, 5112, 5116, 5120, or 5122. In some embodiments, the antisense strand sequence comprises at least 15, 16, 17, 18, 19, 20, or 21 contiguous nucleotides differing by 3, 2, 1, or 0 nucleotides from the nucleotide sequence of SEQ ID NO: 5104; and the sense strand sequence comprises at least 15, 16, 17, 18, 19, 20, or 21 contiguous nucleotides differing by 3, 2, 1, or 0 nucleotides from the nucleotide sequence of any one of SEQ ID NOs: 5101, 5108, 5112, 5116, 5120, or 5122.

[0678] In some embodiments, the siRNA for targeting MAPT comprises an antisense strand sequence comprising at least 15, 16, 17, 18, or 19 contiguous nucleotides differing by 3, 2, 1, or 0 nucleotides from the nucleotide sequence of SEQ ID NO: 4718. In some embodiments, the siRNA comprises a sense strand sequence comprising at least 15, 16, 17, 18, or 19 contiguous nucleotides differing by 3, 2, 1, or 0 nucleotides from the nucleotide sequence of any one of SEQ ID NOs: 4527, 5130, 5134, 5138, or 5142. In some embodiments, the antisense strand sequence comprises at least 15, 16, 17, 18, or 19 contiguous nucleotides differing by 3, 2, 1, or 0 nucleotides from the nucleotide sequence of SEQ ID NO: 4718 and the sense strand sequence comprises at least 15, 16, 17, 18, or 19 contiguous nucleotides differing by 3, 2, 1, or 0 nucleotides from the nucleotide sequence of any one of SEQ ID NOs: 4527, 5130, 5134, 5138, or 5142.

[0679] In some embodiments, the siRNA for targeting MAPT comprises an antisense strand sequence comprising at least 15, 16, 17, 18, 19, 20, or 21 contiguous nucleotides differing by 3, 2, 1, or 0 nucleotides from the nucleotide sequence of SEQ ID NO: 5128. In some embodiments, the siRNA comprises a sense strand sequence comprising at least 15, 16, 17, 18, 19, 20, or 21 contiguous nucleotides differing by 3, 2, 1, or 0 nucleotides from the nucleotide sequence of any one of SEQ ID NOs: 5125, 5132, 5136, 5140, 5144, or 5146. In some embodiments, the antisense strand sequence comprises at least 15, 16, 17, 18, 19, 20, or 21 contiguous nucleotides differing by 3, 2, 1, or 0 nucleotides from the nucleotide sequence of SEQ ID NO: 5128; and the sense strand sequence comprises at least 15, 16, 17, 18, 19, 20, or 21 contiguous nucleotides differing by 3, 2, 1, or 0 nucleotides from the nucleotide sequence of any one of SEQ ID NOs: 5125, 5132, 5136, 5140, 5144, or 5146.

[0680] In some embodiments, the siRNA molecule is screened for the ability to inhibit tau (MAPT) expression in a cell. As a non-limiting example, the cell is a HEK293 cell. As another non-limiting example, the cell is a human tau transgenic primary neuron and/or astrocyte. As another non-limiting example, the cell is a frontotemporal lobar degeneration (FTLD) patient fibroblast. As a non-limiting example, other standard cell lines that may be used for initial screening are: naïve neuronal SK-N-AS cells, monkey cell lines (CYNOM-K1, FRhK-4, or LLC-MK2), primary neuron and astrocyte cultures from htau mice, frontotemporal lobar degeneration (FTLD)-tau patient induced pluripotent stem cells (iPSCs), FTLD-tau patient fibroblasts; nervous system cells derived from multiple affected or at-risk donors (with and without MAPT mutations), FTLD-tau patient lymphoblasts, and human neural stem cells bearing homozygous or heterozygous mutations in MAPT (e.g., P301L, R406W, V337M) that may be introduced using CRISPR-Cas9 gene editing technology. The screened siRNA duplex may be selected from any of the siRNA duplexes presented in Table 4 or 5 of the present disclosure.

[0681] In some embodiments, the siRNA molecules of the present disclosure can be encoded by a vector, e.g., plasmid vector, a viral genome (e.g., an AAV viral genome), or another nucleic acid expression vector for delivery to a cell. In some embodiments, a siRNA molecule is encoded by a viral genome of an AAV particle.

[0682] DNA expression plasmids can be used to stably express the siRNA duplexes or dsRNA of the present disclosure in cells and achieve long-term inhibition of the target gene expression. In one aspect, the sense and antisense strands of a siRNA duplex are typically linked by a short spacer sequence leading to the expression of a stem-loop structure termed short hairpin RNA (shRNA). The hairpin is recognized and cleaved by Dicer, thus generating mature siRNA molecules.

[0683] In some embodiments, the sense and antisense strands of a siRNA duplex may be linked by a short spacer sequence, which may optionally be linked to additional flanking sequence, leading to the expression of a flanking arm-stem-loop structure termed primary microRNA (pri-miRNA). The pri-miRNA may be recognized and cleaved by Drosha and Dicer, and thus generate mature siRNA molecules.

[0684] The expression of MAPT may be assessed based on the level of expression of MAPT mRNA or MAPT protein. In some embodiments, the expression of MAPT, e.g., MAPT mRNA, is inhibited by at least 5%, at least 10%, at least 15%, at least 20%, at least 25%, at least 30%, at least 35%, at least 40%, at least 45%, at least 50%, at least 55%, at least 60%, at least 65%, at least 70%, at least 75%, at least 80%, at least 85%, at least 90%, at least 95%, or at least 99%. In some embodiments, the siRNA duplexes or encoded dsRNA of the present disclosure suppress (or degrade) the target mRNA in a cell, e.g., a neuron (e.g., a cortical neuron) or a glial cell.

[0685] According to the present disclosure, the siRNA molecules are designed and tested for their ability to reduce MAPT transcript levels in cultured cells. Such siRNA molecules may form a duplex such as, but not limited to, any of the sequences listed in Tables 4, 5, 9A, or 9B.

[0686] In some embodiments, the siRNA molecules comprise a miRNA seed match for the target (e.g., MAPT transcript) located in the guide strand. In another embodiment, the siRNA molecules comprise a miRNA seed match for the target (e.g., MAPT transcript) located in the passenger strand. In yet another embodiment, the siRNA duplexes or encoded dsRNA targeting MAPT transcript do not comprise a seed match for the target (e.g., MAPT transcript) located in the guide or passenger strand. In some embodiments, the siRNA duplex is designed so there is no miRNA seed match for the sense or antisense sequence to non-MAPT sequences.

[0687] The present disclosure also provides a pharmaceutical composition comprising a siRNA duplex targeting a MAPT gene, mRNA, or protein, and a pharmaceutically acceptable carrier. In some aspects, the siRNA duplex is encoded by a viral genome and/or modulatory polynucleotide. In some embodiments, an AAV particle comprises the viral genome and an AAV capsid protein, e.g., an AAV capsid variant described herein.

[0688] In some embodiments, the guide to passenger (G: P) (also referred to as the antisense to sense) strand ratio is 1:10, 1:9, 1:8, 1:7, 1:6, 1:5, 1:4, 1:3, 1:2, 1;1, 2:10, 2:9, 2:8, 2:7, 2:6, 2:5, 2:4, 2:3, 2:2, 2:1, 3:10, 3:9, 3:8, 3:7, 3:6, 3:5, 3:4, 3:3, 3:2, 3:1, 4:10, 4:9, 4:8, 4:7, 4:6, 4:5, 4:4, 4:3, 4:2, 4:1, 5:10, 5:9, 5:8, 5:7, 5:6, 5:5, 5:4, 5:3, 5:2, 5:1, 6:10, 6:9, 6:8, 6:7, 6:6, 6:5, 6:4, 6:3, 6:2, 6:1, 7:10, 7:9, 7:8, 7:7, 7:6, 7:5, 7:4, 7:3, 7:2, 7:1, 8:10, 8:9, 8:8, 8:7, 8:6, 8:5, 8:4, 8:3, 8:2, 8:1, 9:10, 9:9, 9:8, 9:7, 9:6, 9:5, 9:4, 9:3, 9:2, 9:1, 10:10, 10:9, 10:8, 10:7, 10:6, 10:5, 10:4, 10:3, 10:2, 10:1, 1:99, 5:95, 10:90, 15:85, 20:80, 25:75, 30:70, 35:65, 40:60, 45:55, 50:50, 55:45, 60:40, 65:35, 70:30, 75:25, 80:20, 85:15, 90:10, 95:5, or 99:1 in vitro or in vivo. In some embodiments, the guide to passenger ratio refers to the ratio of the guide strands to the passenger strands after the intracellular processing of the pri-microRNA. For example, a 80:20 guide-to-passenger ratio would have 8 guide strands to every 2 passenger strands processed from the precursor.

[0689] In some embodiments, the passenger to guide (P: G) (also referred to as the sense to antisense) strand ratio is 1:10, 1:9, 1:8, 1:7, 1:6, 1:5, 1:4, 1:3, 1:2, 1;1, 2:10, 2:9, 2:8, 2:7, 2:6, 2:5, 2:4, 2:3, 2:2, 2:1, 3:10, 3:9, 3:8, 3:7, 3:6, 3:5, 3:4, 3:3, 3:2, 3:1, 4:10, 4:9, 4:8, 4:7, 4:6, 4:5, 4:4, 4:3, 4:2, 4:1, 5:10, 5:9, 5:8, 5:7, 5:6, 5:5, 5:4, 5:3, 5:2, 5:1, 6:10, 6:9, 6:8, 6:7, 6:6, 6:5, 6:4, 6:3, 6:2, 6:1, 7:10, 7:9, 7:8, 7:7, 7:6, 7:5, 7:4, 7:3, 7:2, 7:1, 8:10, 8:9, 8:8, 8:7, 8:6, 8:5, 8:4, 8:3, 8:2, 8:1, 9:10, 9:9, 9:8, 9:7, 9:6, 9:5, 9:4, 9:3, 9:2, 9:1, 10:10, 10:9, 10:8, 10:7, 10:6, 10:5, 10:4, 10:3, 10:2, 10:1, 1:99, 5:95, 10:90, 15:85, 20:80, 25:75, 30:70, 35:65, 40:60, 45:55, 50:50, 55:45, 60:40, 65:35, 70:30, 75:25, 80:20, 85:15, 90:10, 95:5, or 99:1 in vitro or in vivo. In some embodiments, the passenger to guide ratio refers to the ratio of the passenger strands to the guide strands after the excision of the guide strand. For example, a 80:20 passenger to guide ratio would have 8 passenger strands to every 2 guide strands processed from the precursor.

### Molecular Scaffold

[0690] In some embodiments, a viral genome described herein encodes a modulatory polynucleotide comprising a siRNA, e.g., an siRNA described herein for targeting MAPT. In some embodiments, a viral genome described herein comprises a modulatory polynucleotide encoding a siRNA, e.g., an siRNA described herein for targeting MAPT. In some embodiments, the modulatory polynucleotide comprises a molecular scaffold. In some embodiments, a molecular scaffold comprises a framework or starting molecule that forms the sequence or structural basis against which to design or make a subsequent molecule. In some embodiments, the modulatory polynucleotide comprises a 5′ flanking region, a loop region, and a 3′ flanking region. In some embodiments, the modulatory polynucleotide further comprises a passenger strand (e.g., a passenger strand or guide strand sequence of a siRNA for targeting MAPT described herein) and/or a guide strand (e.g., a guide strand or antisense strand sequence of a siRNA for targeting MAPT described herein). In some embodiments, the modulatory polynucleotide is an RNA molecule, e.g., an encoded modulatory polynucleotide. In some embodiments, the modulatory polynucleotide is a DNA molecule, e.g., a DNA molecule encoding the RNA modulatory polynucleotide.

[0691] In some embodiments, the encoded modulatory polynucleotide comprises in 5′ to 3′ order: a 5′ flanking region, a passenger strand (e.g., a passenger strand or guide strand sequence of a siRNA for targeting MAPT described herein), a loop region, a guide strand (e.g., a guide strand or antisense strand sequence of a siRNA for targeting MAPT described herein), and a 3′ flanking region. In some embodiments, the encoded modulatory polynucleotide is an RNA molecule.

[0692] In some embodiments, the modulatory polynucleotide comprises in 5′ to 3′ order: a 5′ flanking region, a guide strand (e.g., a guide strand or antisense strand sequence of a siRNA for targeting MAPT described herein), a loop region, a passenger strand (e.g., a passenger strand or sense strand sequence of a siRNA for targeting MAPT described herein), and a 3′ flanking region. In some embodiments, the modulatory polynucleotide is a DNA molecule.

[0693] In some embodiments, the modulatory polynucleotide comprises a stem-loop structure. In some embodiments, the passenger strand and the guide strand are located, respectively, on a 5′ arm and a 3′ arm of a stem loop structure, wherein the passenger strand is located between the 5′ flanking region and the loop region and the guide strand is located between the loop region and the 3′ flanking region. In some embodiments, the guide strand and the passenger strand are located, respectively, on a 5′ arm and a 3′ arm of a stem loop structure, wherein the guide strand is located between the 5′ flanking region and the loop region and the passenger strand is located between the loop region and the 3′ flanking region.

[0694] In some embodiments the 5′ and 3′ flanking sequences comprise the same nucleotide sequence. In some embodiments the nucleotide sequence of the 5′ flanking region differs by at least 2%, 3%, 4%, 5%, relative to the 3′ flanking region, when aligned to each other. In some embodiments, the 5′ flanking region and the 3′ flanking region comprise different nucleotide sequences.

[0695] In some embodiments, the loop region comprises a nucleic acid sequence encoding at least one UGUG motif. In some embodiments, the nucleic acid sequence encoding the UGUG motif is located at the 5′ terminus of the loop sequence.

[0696] In some embodiments, a molecular scaffold described herein comprises the nucleotide sequence of a 5′ flanking region, a loop region and a 3′ flanking region, provided in Tables 6-8, or a fragment thereof. In some embodiments, the 5′ flanking region, loop region, and 3′ flanking region comprises or is encoded by a nucleotide sequence provided in Tables 6-8, or a fragment thereof.

TABLE 6
Exemplary 5′ Flanking Regions

| | | SEQ ID |
|---|---|---|
| Name | Sequence | NO |
| 5F1 (DNA) | TTTATGCCTCATCCTCTGAGTGCTGAAGGCTTGCTGTA | 4353 |
| | GGCTGTATGCTG | |
| 5F1 (RNA) | UUUAUGCCUCAUCCUCUGAGUGCUGAAGGCUUGCUG | 4878 |
| | UAGGCUGUAUGCUG | |
| 5F2 (DNA) | GTGCTGGGCGGGGGGCGGCGGGCCCTCCCGCAGAAC | 4354 |
| | ACCATGCGCTCTTCGGAA | |
| 5F2 (RNA) | GUGCUGGGCGGGGGGGGCGGGCCCUCCCGCAGAAC | 4879 |
| | ACCAUGCGCUCUUCGGAA | |
| 5F3 (DNA) | GAAGCAAAGAAGGGGCAGAGGGAGCCCGTGAGCTGA | 4355 |
| | GTGGGCCAGGGACTGGGAGAAGGAGTGAGGAGGCAG | |
| | GGCCGGCATGCCTCTGCTGCTGGCCAGA | |
| 5F3 (RNA) | GAAGCAAAGAAGGGGCAGAGGGAGCCCGUGAGCUG | 4880 |
| | AGUGGGCCAGGGACUGGGAGAAGGAGUGAGGAGGC | |
| | AGGGCCGGCAUGCCUCUGCUGCUGGCCAGA | |
| 5F4 (DNA) | GTGCTGGGCGGGGGGCGGCGGGCCCTCCCGCAGAAC | 4356 |
| | ACCATGCGCTCTTCGGGA | |
| 5F4 (RNA) | GUGCUGGGCGGGGGGCGGCGGGCCCUCCCGCAGAAC | 4881 |
| | ACCAUGCGCUCUUCGGGA | |
| 5F5 (DNA) | GTGCTGGGCGGGGGGCGGCGGGCCCTCCCGCAGAAC | 4357 |
| | ACCATGCGCTCCACGGAA | |
| 5F5 (RNA) | GUGCUGGGCGGGGGGCGGCGGGCCCUCCCGCAGAAC | 4882 |
| | ACCAUGCGCUCCACGGAA | |
| 5F6 (DNA) | GGGCCCTCCCGCAGAACACCATGCGCTCCACGGAA | 4358 |
| 5F5 (RNA) | GGGCCCUCCCGCAGAACACCAUGCGCUCCACGGAA | 4883 |
| 5F7 (DNA) | CTCCCGCAGAACACCATGCGCTCCACGGAA | 4359 |
| 5F7 (RNA) | CUCCCGCAGAACACCAUGCGCUCCACGGAA | 4884 |
| 5F8 (DNA) | GTGCTGGGCGGGGGGCGGCGGGCCCTCCCGCAGAAC | 4360 |
| | ACCATGCGCTCCACGGAAG | |
| 5F8 (RNA) | GUGCUGGGCGGGGGGCGGCGGGCCCUCCCGCAGAAC | 4885 |
| | ACCAUGCGCUCCACGGAAG | |
| 5F9 (DNA) | GTGCTGGGCGGGGGGCGGCGGGCCCTCCCGCAGAAC | 4361 |
| | ACCATGCGCTCCTCGGAA | |
| 5F9 (RNA) | GUGCUGGGGGGGGGGGGCGGGCCCUCCCGCAGAAC | 4886 |
| | ACCAUGCGCUCCUCGGAA | |

TABLE 7
Exemplary Loop Regions

| Name | Sequence | SEQ ID NO |
|---|---|---|
| L1 (DNA) | TGTGACCTGG | 4362 |
| L1 (RNA) | UGUGACCUGG | 4887 |
| L2 (DNA) | TGTGATTTGG | 4363 |
| L2 (RNA | UGUGAUUUGG | 4888 |
| L3 (DNA) | TATAATTTGG | 4364 |
| L3 (RNA) | UAUAAUUUGG | 4889 |
| L4 (DNA) | CCTGACCCAGT | 4365 |
| L4 (RNA) | CCUGACCCAGU | 4890 |
| L5 (DNA) | GTCTGCACCTGTCACTAG | 4366 |
| L5 (RNA) | GUCUGCACCUGUCACUAG | 4891 |
| L6 (DNA) | GTGACCCAAG | 4367 |
| L6 (RNA) | GUGACCCAAG | 4892 |
| L7 (DNA) | GTGGCCACTGAGAAG | 4368 |
| L7 (RNA) | GUGGCCACUGAGAAG | 4893 |
| L8 (DNA) | GTGACCCAAT | 4369 |
| L8 (RNA) | GUGACCCAAU | 4894 |
| L9 (DNA) | GTGACCCAAC | 4370 |
| L9 (RNA) | GUGACCCAAC | 4895 |
| L10 (DNA) | GTGGCCACTGAGAAA | 4371 |
| L10 (RNA) | GUGGCCACUGAGAAA | 4896 |

TABLE 8
Exemplary 3′ Flanking Regions

| | | SEQ ID |
|---|---|---|
| Name | Sequence | NO |
| 3F1 (DNA) | AGTGTATGATGCCTGTTACTAGCATTCACATGGAACA | 4372 |
| | AATTGCTGCCGTG | |
| 3F1 (RNA) | AGUGUAUGAUGCCUGUUACUAGCAUUCACAUGGAA | 4897 |
| | CAAAUUGCUGCCGUG | |
| 3F2 (DNA) | CTGAGGAGCGCCTTGACAGCAGCCATGGGAGGGCCG | 4373 |
| | CCCCCTACCTCAGTGA | |
| 3F2 (RNA) | CUGAGGAGCGCCUUGACAGCAGCCAUGGGAGGGCCG | 4898 |
| | CCCCCUACCUCAGUGA | |
| 3F3 (DNA) | CTGTGGAGCGCCTTGACAGCAGCCATGGGAGGGCCG | 4374 |
| | CCCCCTACCTCAGTGA | |
| 3F3 (RNA) | CUGUGGAGCGCCUUGACAGCAGCCAUGGGAGGGCCG | 4899 |
| | CCCCCUACCUCAGUGA | |
| 3F4 (DNA) | TGGCCGTGTAGTGCTACCCAGCGCTGGCTGCCTCCTC | 4375 |
| | AGCATTGCAATTCCTCTCCCATCTGGGCACCAGTCAG | |
| | CTACCCTGGTGGGAATCTGGGTAGCC | |
| 3F4 (RNA) | UGGCCGUGUAGUGCUACCCAGCGCUGGCUGCCUCCU | 4900 |
| | CAGCAUUGCAAUUCCUCUCCCAUCUGGGCACCAGUC | |
| | AGCUACCCUGGUGGGAAUCUGGGUAGCC | |
| 3F5 (DNA) | GGCCGTGTAGTGCTACCCAGCGCTGGCTGCCTCCTCA | 4376 |
| | GCATTGCAATTCCTCTCCCATCTGGGCACCAGTCAGC | |
| | TACCCTGGTGGGAATCTGGGTAGCC | |
| 3F5 (RNA) | GGCCGUGUAGUGCUACCCAGCGCUGGCUGCCUCCUC | 4901 |
| | AGCAUUGCAAUUCCUCUCCCAUCUGGGCACCAGUCA | |
| | GCUACCCUGGUGGGAAUCUGGGUAGCC | |
| 3F6 (DNA) | TCCTGAGGAGCGCCTTGACAGCAGCCATGGGAGGGC | 4377 |
| | CGCCCCCTACCTCAGTGA | |
| 3F6 (RNA) | UCCUGAGGAGCGCCUUGACAGCAGCCAUGGGAGGGC | 4902 |
| | CGCCCCCUACCUCAGUGA | |
| 3F7 (DNA) | CTGAGGAGCGCCTTGACAGCAGCCATGGGAGGGCC | 4378 |
| 3F7 (RNA) | CUGAGGAGCGCCUUGACAGCAGCCAUGGGAGGGCC | 4903 |
| 3F8 (DNA) | CTGCGGAGCGCCTTGACAGCAGCCATGGGAGGGCCG | 4379 |
| | CCCCCTACCTCAGTGA | |
| 3F8 (RNA) | CUGCGGAGCGCCUUGACAGCAGCCAUGGGAGGGCCG | 4904 |
| | CCCCCUACCUCAGUGA | |

[0697] Any of the regions described in Table 6, Table 7, and Table 8 or a fragment of variant thereof may be used in the molecular scaffolds described herein, e.g., a molecular scaffold encoding or comprising a siRNA for targeting MAPT described herein.

[0698] In some embodiments, the modulatory polynucleotide comprises a 5′ flanking region, fragment or variant thereof, e.g., as listed in Table 6 or as provided in WO2016077689, WO2017201248, WO2018204797, WO2017201258, WO2018204803, or WO2021016505, the contents of which are hereby incorporated by reference in their entirety.

[0699] In some embodiments, the encoded 5′ flanking region comprises the nucleotide sequence of any one of SEQ ID NOs: 4878-4886; a nucleotide sequence substantially identical (e.g., having at least 70%, 75%, 80%, 85%, 90%, 95% 96%, 97%, 98%, 99% sequence identity) thereto; a nucleotide sequence comprising one, two, three, four, five, six, or seven, but no more than ten different nucleotides relative to the nucleotide sequence of any of SEQ ID NOs: 4878-4886; or a nucleotide sequence comprising one, two, three, four, five, six, or seven, but no more than ten modifications relative to the nucleotide sequence of any of SEQ ID NOs: 4878-4886.

[0700] In some embodiments, the nucleotide sequence encoding the 5′ flanking region comprises the nucleotide sequence of any of SEQ ID NOs: 4353-4361, a nucleotide sequence, substantially identical (e.g., having at least 70%, 75%, 80%, 85%, 90%, 95% 96%, 97%, 98%, 99% sequence identity) thereto; a nucleotide sequence comprising one, two, three, four, five, six, or seven, but no more than ten different nucleotides relative to the nucleotide sequence of any of SEQ ID NOs: 4353-4361; or a nucleotide sequence comprising one, two, three, four, five, six, or seven, but no more than ten modifications relative to the nucleotide sequence of any of SEQ ID NOs: 4353-4361.

[0701] In some embodiments, the 5′ flanking region comprises the nucleotide sequence of SEQ ID NO: 4354; a nucleotide sequence, substantially identical (e.g., having at least 70%, 75%, 80%, 85%, 90%, 95% 96%, 97%, 98%, 99% sequence identity) to SEQ ID NO: 4354; a nucleotide sequence comprising one, two, three, four, five, six, or seven, but no more than ten different nucleotides relative to the nucleotide sequence of SEQ ID NO: 4354; or a nucleotide sequence comprising one, two, three, four, five, six, or seven, but no more than ten modifications relative to the nucleotide sequence of SEQ ID NO: 4354. In some embodiments, the 5′ flanking region comprises the nucleotide sequence of SEQ ID NO: 4355; a nucleotide sequence, substantially identical (e.g., having at least 70%, 75%, 80%, 85%, 90%, 95% 96%, 97%, 98%, 99% sequence identity) to SEQ ID NO: 4355; a nucleotide sequence comprising one, two, three, four, five, six, or seven, but no more than ten different nucleotides relative to the nucleotide sequence of SEQ ID NO: 4355; or a nucleotide sequence comprising one, two, three, four, five, six, or seven, but no more than ten modifications relative to the nucleotide sequence of SEQ ID NO: 4355.

[0702] In some embodiments, the encoded 5′ flanking region comprises the nucleotide sequence of SEQ ID NO: 4879; a nucleotide sequence, substantially identical (e.g., having at least 70%, 75%, 80%, 85%, 90%, 95% 96%, 97%, 98%, 99% sequence identity) to SEQ ID NO: 4879; a nucleotide sequence comprising one, two, three, four, five, six, or seven, but no more than ten different nucleotides relative to the nucleotide sequence of SEQ ID NO: 4879; or a nucleotide sequence comprising one, two, three, four, five, six, or seven, but no more than ten modifications relative to the nucleotide sequence of SEQ ID NO: 4879. In some embodiments, the nucleotide sequence encoding the 5′ flanking region comprises the nucleotide sequence of SEQ ID NO: 4354; a nucleotide sequence, substantially identical (e.g., having at least 70%, 75%, 80%, 85%, 90%, 95% 96%, 97%, 98%, 99% sequence identity) to SEQ ID NO: 4354; a nucleotide sequence comprising one, two, three, four, five, six, or seven, but no more than ten different nucleotides relative to the nucleotide sequence of SEQ ID NO: 4354; or a nucleotide sequence comprising one, two, three, four, five, six, or seven, but no more than ten modifications relative to the nucleotide sequence of SEQ ID NO: 4354.

[0703] In some embodiments, the encoded 5′ flanking region comprises the nucleotide sequence of SEQ ID NO: 4880; a nucleotide sequence, substantially identical (e.g., having at least 70%, 75%, 80%, 85%, 90%, 95% 96%, 97%, 98%, 99% sequence identity) to SEQ ID NO: 4880; a nucleotide sequence comprising one, two, three, four, five, six, or seven, but no more than ten different nucleotides relative to the nucleotide sequence of SEQ ID NO: 4880; or a nucleotide sequence comprising one, two, three, four, five, six, or seven, but no more than ten modifications relative to the nucleotide sequence of SEQ ID NO: 4880. In some embodiments, the nucleotide sequence encoding the 5′ flanking region comprises the nucleotide sequence of SEQ ID NO: 4355; a nucleotide sequence, substantially identical (e.g., having at least 70%, 75%, 80%, 85%, 90%, 95% 96%, 97%, 98%, 99% sequence identity) to SEQ ID NO: 4355; a nucleotide sequence comprising one, two, three, four, five, six, or seven, but no more than ten different nucleotides relative to the nucleotide sequence of SEQ ID NO: 4355; or a nucleotide sequence comprising one, two, three, four, five, six, or seven, but no more than ten modifications relative to the nucleotide sequence of SEQ ID NO: 4355.

[0704] In some embodiments, the modulatory polynucleotide comprises a loop region, fragment or variant thereof, e.g., as provided in Table 7 or as provided in WO2016077689, WO2017201248, WO2018204797, WO2017201258, WO2018204803, or WO2021016505, the contents of which are hereby incorporated by reference in their entirety.

[0705] In some embodiments, the encoded loop region comprises the nucleotide sequence of any of SEQ ID NOs: 4887-4896; a nucleotide sequence substantially identical (e.g., having at least 70%, 75%, 80%, 85%, 90%, 95% 96%, 97%, 98%, 99% sequence identity) thereto; a nucleotide sequence comprising one, two, three, or four, but no more than five different nucleotides relative to the nucleotide sequence of any of SEQ ID NOs: 4887-4896; or a nucleotide sequence comprising one, two, three, or four, but no more than five modifications relative to the nucleotide sequence of any of SEQ ID NOs: 4887-4896.

[0706] In some embodiments, the nucleotide sequence encoding the loop region comprises the nucleotide sequence of any of SEQ ID NOs: 4362-4371; a nucleotide sequence substantially identical (e.g., having at least 70%, 75%, 80%, 85%, 90%, 95% 96%, 97%, 98%, 99% sequence identity) thereto; a nucleotide sequence comprising one, two, three, or four, but no more than five different nucleotides relative to the nucleotide sequence of any of SEQ ID NOs: 4362-4371; or a nucleotide sequence comprising one, two, three, or four, but no more than five modifications relative to the nucleotide sequence of any of SEQ ID NOs: 4362-4371.

[0707] In some embodiments, the loop region comprises the nucleotide sequence of SEQ ID NO: 4362; a nucleotide sequence substantially identical (e.g., having at least 70%, 75%, 80%, 85%, 90%, 95% 96%, 97%, 98%, 99% sequence identity) to SEQ ID NO: 4362; a nucleotide sequence comprising one, two, three, or four, but no more than five different nucleotides relative to the nucleotide sequence of SEQ ID NO: 4362; or a nucleotide sequence comprising one, two, three, or four, but no more than five modifications relative to the nucleotide sequence of SEQ ID NO: 4362. In some embodiments, the loop region comprises the nucleotide sequence of SEQ ID NO: 4363; a nucleotide sequence substantially identical (e.g., having at least 70%, 75%, 80%, 85%, 90%, 95% 96%, 97%, 98%, 99% sequence identity) to SEQ ID NO: 4363; a nucleotide sequence comprising one, two, three, or four, but no more than five different nucleotides relative to the nucleotide sequence of SEQ ID NO: 4363; or a nucleotide sequence comprising one, two, three, or four, but no more than five modifications relative to the nucleotide sequence of SEQ ID NO: 4363. In some embodiments, the loop region comprises the nucleotide sequence of SEQ ID NO: 4366; a nucleotide sequence substantially identical (e.g., having at least 70%, 75%, 80%, 85%, 90%, 95% 96%, 97%, 98%, 99% sequence identity) to SEQ ID NO: 4366; a nucleotide sequence comprising one, two, three, or four, but no more than five different nucleotides relative to the nucleotide sequence of SEQ ID NO: 4366; or a nucleotide sequence comprising one, two, three, or four, but no more than five modifications relative to the nucleotide sequence of SEQ ID NO: 4366.

[0708] In some embodiments, the encoded loop region comprises the nucleotide sequence of SEQ ID NO: 4887; a nucleotide sequence substantially identical (e.g., having at least 70%, 75%, 80%, 85%, 90%, 95% 96%, 97%, 98%, 99% sequence identity) to SEQ ID NO: 4887; a nucleotide sequence comprising one, two, three, or four, but no more than five different nucleotides relative to the nucleotide sequence of SEQ ID NO: 4887; or a nucleotide sequence comprising one, two, three, or four, but no more than five modifications relative to the nucleotide sequence of SEQ ID NO: 4887. In some embodiments, the nucleotide sequence encoding the loop region comprises the nucleotide sequence of SEQ ID NO: 4362; a nucleotide sequence substantially identical (e.g., having at least 70%, 75%, 80%, 85%, 90%, 95% 96%, 97%, 98%, 99% sequence identity) to SEQ ID NO: 4362; a nucleotide sequence comprising one, two, three, or four, but no more than five different nucleotides relative to the nucleotide sequence of SEQ ID NO: 4362; or a nucleotide sequence comprising one, two, three, or four, but no more than five modifications relative to the nucleotide sequence of SEQ ID NO: 4362.

[0709] In some embodiments, the encoded loop region comprises the nucleotide sequence of SEQ ID NO: 4888; a nucleotide sequence substantially identical (e.g., having at least 70%, 75%, 80%, 85%, 90%, 95% 96%, 97%, 98%, 99% sequence identity) to SEQ ID NO: 4888; a nucleotide sequence comprising one, two, three, or four, but no more than five different nucleotides relative to the nucleotide sequence of SEQ ID NO: 4888; or a nucleotide sequence comprising one, two, three, or four, but no more than five modifications relative to the nucleotide sequence of SEQ ID NO: 4888. In some embodiments, the nucleotide sequence encoding the loop region comprises the nucleotide sequence of SEQ ID NO: 4363; a nucleotide sequence substantially identical (e.g., having at least 70%, 75%, 80%, 85%, 90%, 95% 96%, 97%, 98%, 99% sequence identity) to SEQ ID NO: 4363; a nucleotide sequence comprising one, two, three, or four, but no more than five different nucleotides relative to the nucleotide sequence of SEQ ID NO: 4363; or a nucleotide sequence comprising one, two, three, or four, but no more than five modifications relative to the nucleotide sequence of SEQ ID NO: 4363.

[0710] In some embodiments, the encoded loop region comprises the nucleotide sequence of SEQ ID NO: 4891; a nucleotide sequence substantially identical (e.g., having at least 70%, 75%, 80%, 85%, 90%, 95% 96%, 97%, 98%, 99% sequence identity) to SEQ ID NO: 4891; a nucleotide sequence comprising one, two, three, or four, but no more than five different nucleotides relative to the nucleotide sequence of SEQ ID NO: 4891; or a nucleotide sequence comprising one, two, three, or four, but no more than five modifications relative to the nucleotide sequence of SEQ ID NO: 4891. In some embodiments, the nucleotide sequence encoding the loop region comprises the nucleotide sequence of SEQ ID NO: 4366; a nucleotide sequence substantially identical (e.g., having at least 70%, 75%, 80%, 85%, 90%, 95% 96%, 97%, 98%, 99% sequence identity) to SEQ ID NO: 4366; a nucleotide sequence comprising one, two, three, or four, but no more than five different nucleotides relative to the nucleotide sequence of SEQ ID NO: 4366; or a nucleotide sequence comprising one, two, three, or four, but no more than five modifications relative to the nucleotide sequence of SEQ ID NO: 4366.

[0711] In some embodiments, the modulatory polynucleotide comprises a 3′ flanking region, fragment or variant thereof, e.g., as listed in Table 8 or as provided in WO2016077689, WO2017201248, WO2018204797, WO2017201258, WO2018204803, or WO2021016505, the contents of which are hereby incorporated by reference in their entirety.

[0712] In some embodiments, the encoded 3′ flanking region comprises the nucleotide sequence of any one of SEQ ID NOs: 4897-4904; a nucleotide sequence substantially identical (e.g., having at least 70%, 75%, 80%, 85%, 90%, 95% 96%, 97%, 98%, 99% sequence identity) thereto; a nucleotide sequence comprising one, two, three, four, five, six, or seven, but no more than ten modifications relative to the nucleotide sequence of any of SEQ ID NOs: 4897-4904; or a nucleotide sequence comprising one, two, three, four, five, six, or seven, but no more than ten modifications relative to the nucleotide sequence of any of SEQ ID NOs: 4897-4904.

[0713] In some embodiments, the nucleotide sequence encoding the 3′ flanking region comprises the nucleotide sequence of any of SEQ ID NOs: 4372-4379; a nucleotide sequence, substantially identical (e.g., having at least 70%, 75%, 80%, 85%, 90%, 95% 96%, 97%, 98%, 99% sequence identity) thereto; a nucleotide sequence comprising one, two, three, four, five, six, or seven, but no more than ten different nucleotides relative to the nucleotide sequence of any of SEQ ID NOs: 4372-4379; or a nucleotide sequence comprising one, two, three, four, five, six, or seven, but no more than ten modifications relative to the nucleotide sequence of any of SEQ ID NOs: 4372-4379.

[0714] In some embodiments, the 3′ flanking region comprises the nucleotide sequence of SEQ ID NO: 4373; a nucleotide sequence, substantially identical (e.g., having at least 70%, 75%, 80%, 85%, 90%, 95% 96%, 97%, 98%, 99% sequence identity) to SEQ ID NO: 4373; a nucleotide sequence comprising one, two, three, four, five, six, or seven, but no more than ten modifications relative to the nucleotide sequence of SEQ ID NO: 4373; or a nucleotide sequence comprising one, two, three, four, five, six, or seven, but no more than ten modifications relative to the nucleotide sequence of SEQ ID NO: 4373. In some embodiments, the 3′ flanking region comprises the nucleotide sequence of SEQ ID NO: 4374; a nucleotide sequence, substantially identical (e.g., having at least 70%, 75%, 80%, 85%, 90%, 95% 96%, 97%, 98%, 99% sequence identity) to SEQ ID NO: 4374; a nucleotide sequence comprising one, two, three, four, five, six, or seven, but no more than ten different nucleotides relative to the nucleotide sequence of SEQ ID NO: 4374; or a nucleotide sequence comprising one, two, three, four, five, six, or seven, but no more than ten modifications relative to the nucleotide sequence of SEQ ID NO: 4374. In some embodiments, the 3′ flanking region comprises the nucleotide sequence of SEQ ID NO: 4375; a nucleotide sequence, substantially identical (e.g., having at least 70%, 75%, 80%, 85%, 90%, 95% 96%, 97%, 98%, 99% sequence identity) to SEQ ID NO: 4375; a nucleotide sequence comprising one, two, three, four, five, six, or seven, but no more than ten modifications relative to the nucleotide sequence of SEQ ID NO: 4375; or a nucleotide sequence comprising one, two, three, four, five, six, or seven, but no more than ten modifications relative to the nucleotide sequence of SEQ ID NO: 4375.

[0715] In some embodiments, the encoded 3′ flanking region comprises the nucleotide sequence of SEQ ID NO: 4898; a nucleotide sequence substantially identical (e.g., having at least 70%, 75%, 80%, 85%, 90%, 95% 96%, 97%, 98%, 99% sequence identity) to SEQ ID NO: 4898; a nucleotide sequence comprising one, two, three, four, five, six, or seven, but no more than ten different nucleotides relative to the nucleotide sequence of SEQ ID NO: 4898; or a nucleotide sequence comprising one, two, three, four, five, six, or seven, but no more than ten modifications relative to the nucleotide sequence of SEQ ID NO: 4898. In some embodiments, the nucleotide sequence encoding the 3′ flanking region comprises the nucleotide sequence of SEQ ID NO: 4373; a nucleotide sequence, substantially identical (e.g., having at least 70%, 75%, 80%, 85%, 90%, 95% 96%, 97%, 98%, 99% sequence identity) to SEQ ID NO: 4373; a nucleotide sequence comprising one, two, three, four, five, six, or seven, but no more than ten different nucleotides relative to the nucleotide sequence of SEQ ID NO: 4373; or a nucleotide sequence comprising one, two, three, four, five, six, or seven, but no more than ten modifications relative to the nucleotide sequence of SEQ ID NO: 4373.

[0716] In some embodiments, the encoded 3′ flanking region comprises the nucleotide sequence of SEQ ID NO: 4899; a nucleotide sequence substantially identical (e.g., having at least 70%, 75%, 80%, 85%, 90%, 95% 96%, 97%, 98%, 99% sequence identity) to SEQ ID NO: 4899; a nucleotide sequence comprising one, two, three, four, five, six, or seven, but no more than ten different nucleotides relative to the nucleotide sequence of SEQ ID NO: 4898; or a nucleotide sequence comprising one, two, three, four, five, six, or seven, but no more than ten modifications relative to the nucleotide sequence of SEQ ID NO: 4899. In some embodiments, the nucleotide sequence encoding the 3′ flanking region comprises the nucleotide sequence of SEQ ID NO: 4374; a nucleotide sequence, substantially identical (e.g., having at least 70%, 75%, 80%, 85%, 90%, 95% 96%, 97%, 98%, 99% sequence identity) to SEQ ID NO: 4374; a nucleotide sequence comprising one, two, three, four, five, six, or seven, but no more than ten different nucleotides relative to the nucleotide sequence of SEQ ID NO: 4374; or a nucleotide sequence comprising one, two, three, four, five, six, or seven, but no more than ten modifications relative to the nucleotide sequence of SEQ ID NO: 4374.

[0717] me embodiments, the encoded 3′ flanking region comprises the nucleotide sequence of SEQ ID NO: 4900; a nucleotide sequence substantially identical (e.g., having at least 70%, 75%, 80%, 85%, 90%, 95% 96%, 97%, 98%, 99% sequence identity) to SEQ ID NO: 4900; a nucleotide sequence comprising one, two, three, four, five, six, or seven, but no more than ten different nucleotides relative to the nucleotide sequence of SEQ ID NO: 4898; or a nucleotide sequence comprising one, two, three, four, five, six, or seven, but no more than ten modifications relative to the nucleotide sequence of SEQ ID NO: 4900. In some embodiments, the nucleotide sequence encoding the 3′ flanking region comprises the nucleotide sequence of SEQ ID NO: 4375; a nucleotide sequence, substantially identical (e.g., having at least 70%, 75%, 80%, 85%, 90%, 95% 96%, 97%, 98%, 99% sequence identity) to SEQ ID NO: 4375; a nucleotide sequence comprising one, two, three, four, five, six, or seven, but no more than ten different nucleotides relative to the nucleotide sequence of SEQ ID NO: 4375; or a nucleotide sequence comprising one, two, three, four, five, six, or seven, but no more than ten modifications relative to the nucleotide sequence of SEQ ID NO: 4375.

[0718] In some embodiments, the encoded modulatory polynucleotide comprises: (i) a 5′ flanking region comprising the nucleotide sequence of any one of SEQ ID NOs: 4878-4886, a nucleotide sequence substantially identical (e.g., having at least 70%, 75%, 80%, 85%, 90%, 95% 96%, 97%, 98%, 99% sequence identity) thereto, a nucleotide sequence comprising one, two, three, four, five, six, or seven, but no more than ten different nucleotides relative to the nucleotide sequence of any one of SEQ ID NOs: 4878-4886; or a nucleotide sequence comprising one, two, three, four, five, six, or seven, but no more than ten different nucleotides relative to the nucleotide sequence of any one of SEQ ID NOs: 4878-4886; (ii) a loop region comprising the nucleotide sequence of any one of SEQ ID NOs: 4887-4896, a nucleotide sequence substantially identical (e.g., having at least 70%, 75%, 80%, 85%, 90%, 95% 96%, 97%, 98%, 99% sequence identity) thereto, a nucleotide sequence comprising one, two, three, or four, but no more than five different nucleotides relative to the nucleotide sequence of any one of SEQ ID NOs: 4887-4896; or a nucleotide sequence comprising one, two, three, or four, but no more than five different nucleotides relative to the nucleotide sequence of any one of SEQ ID NOs: 4887-4896; and (iii) a 3′ flanking region of any one of SEQ ID NOs: 4897-4904, a nucleotide sequence substantially identical (e.g., having at least 70%, 75%, 80%, 85%, 90%, 95% 96%, 97%, 98%, 99% sequence identity) thereto, a nucleotide sequence comprising one, two, three, four, five, six, or seven, but no more than ten different nucleotides relative to the nucleotide sequence of any one of SEQ ID NOs: 4897-4904, a nucleotide sequence comprising one, two, three, four, five, six, or seven, but no more than ten modifications relative to the nucleotide sequence of any one of SEQ ID NOs: 4897-4904.

[0719] In some embodiments, the modulatory polynucleotide comprises: (i) a 5′ flanking region comprising the nucleotide sequence of any one of SEQ ID NOs: 4353-4361, a nucleotide sequence substantially identical (e.g., having at least 70%, 75%, 80%, 85%, 90%, 95% 96%, 97%, 98%, 99% sequence identity) thereto, a nucleotide sequence comprising one, two, three, four, five, six, or seven, but no more than ten different nucleotides relative to the nucleotide sequence of any one of SEQ ID NOs: 4353-4361; or a nucleotide sequence comprising one, two, three, four, five, six, or seven, but no more than ten different nucleotides relative to the nucleotide sequence of any one of SEQ ID NOs: 4353-4361; (ii) a loop region comprising the nucleotide sequence of any one of SEQ ID NOs: 4362-4371, a nucleotide sequence substantially identical (e.g., having at least 70%, 75%, 80%, 85%, 90%, 95% 96%, 97%, 98%, 99% sequence identity) thereto, a nucleotide sequence comprising one, two, three, or four, but no more than five different nucleotides relative to the nucleotide sequence of any one of SEQ ID NOs: 4362-4371; or a nucleotide sequence comprising one, two, three, or four, but no more than five different nucleotides relative to the nucleotide sequence of any one of SEQ ID NOs: 4362-4371; and (iii) a 3′ flanking region of any one of SEQ ID NOs: 4372-4379, a nucleotide sequence substantially identical (e.g., having at least 70%, 75%, 80%, 85%, 90%, 95% 96%, 97%, 98%, 99% sequence identity) thereto, a nucleotide sequence comprising one, two, three, four, five, six, or seven, but no more than ten different nucleotides relative to the nucleotide sequence of any one of SEQ ID NOs: 4372-4379, a nucleotide sequence comprising one, two, three, four, five, six, or seven, but no more than ten modifications relative to the nucleotide sequence of any one of SEQ ID NOs: 4372-4379.

[0720] In some embodiments, the encoded modulatory polynucleotide comprises: (i) a 5′ flanking region comprising the nucleotide sequence of SEQ ID NO: 4879, a nucleotide sequence substantially identical (e.g., having at least 70%, 75%, 80%, 85%, 90%, 95% 96%, 97%, 98%, 99% sequence identity) to SEQ ID NO: 4879, a nucleotide sequence comprising one, two, three, four, five, six, or seven, but no more than ten different nucleotides relative to the nucleotide sequence of SEQ ID NO: 4879; or a nucleotide sequence comprising one, two, three, four, five, six, or seven, but no more than ten different nucleotides relative to the nucleotide sequence of SEQ ID NO: 4879; (ii) a loop region comprising the nucleotide sequence of SEQ ID NO: 4887, a nucleotide sequence substantially identical (e.g., having at least 70%, 75%, 80%, 85%, 90%, NO: 4887; or a nucleotide sequence comprising one, two, three, or four, but no more than five different nucleotides relative to the nucleotide sequence of SEQ ID NO: 4887; and (iii) a 3′ flanking region of SEQ ID NO: 4898, a nucleotide sequence substantially identical (e.g., having at least 70%, 75%, 80%, 85%, 90%, 95% 96%, 97%, 98%, 99% sequence identity) to SEQ ID NO: 4898, a nucleotide sequence comprising one, two, three, four, five, six, or seven, but no more than ten different nucleotides relative to the nucleotide sequence of SEQ ID NO: 4898, a nucleotide sequence comprising one, two, three, four, five, six, or seven, but no more than ten modifications relative to the nucleotide sequence of SEQ ID NO: 4898.

[0721] In some embodiments, the modulatory polynucleotide comprises: (i) a 5′ flanking region comprising the nucleotide sequence of SEQ ID NO: 4354, a nucleotide sequence substantially identical (e.g., having at least 70%, 75%, 80%, 85%, 90%, 95% 96%, 97%, 98%, 99% sequence identity) to SEQ ID NO: 4354, a nucleotide sequence comprising one, two, three, four, five, six, or seven, but no more than ten different nucleotides relative to the nucleotide sequence of SEQ ID NO: 4354; or a nucleotide sequence comprising one, two, three, four, five, six, or seven, but no more than ten different nucleotides relative to the nucleotide sequence of SEQ ID NO: 4354; (ii) a loop region comprising the nucleotide sequence of SEQ ID NO: 4362, a nucleotide sequence substantially identical (e.g., having at least 70%, 75%, 80%, 85%, 90%, 95% 96%, 97%, 98%, 99% sequence identity) to SEQ ID NO: 4362, a nucleotide sequence comprising one, two, three, or four, but no more than five different nucleotides relative to the nucleotide sequence of SEQ ID NO: 4362: or a nucleotide sequence comprising one, two, three, or four, but no more than five different nucleotides relative to the nucleotide sequence of SEQ ID NO: 4362; and (iii) a 3′ flanking region of SEQ ID NO: 4373, a nucleotide sequence substantially identical (e.g., having at least 70%, 75%, 80%, 85%, 90%, 95% 96%, 97%, 98%, 99% sequence identity) to SEQ ID NO: 4373, a nucleotide sequence comprising one, two, three, four, five, six, or seven, but no more than ten different nucleotides relative to the nucleotide sequence of SEQ ID NO: 4373, a nucleotide sequence comprising one, two, three, four, five, six, or seven, but no more than ten modifications relative to the nucleotide sequence of SEQ ID NO: 4373.

[0722] In some embodiments, the encoded modulatory polynucleotide comprises: (i) a 5′ flanking region comprising the nucleotide sequence of SEQ ID NO: 4879, a nucleotide sequence substantially identical (e.g., having at least 70%, 75%, 80%, 85%, 90%, 95% 96%, 97%, 98%, 99% sequence identity) to SEQ ID NO: 4879, a nucleotide sequence comprising one, two, three, four, five, six, or seven, but no more than ten different nucleotides relative to the nucleotide sequence of SEQ ID NO: 4879; or a nucleotide sequence comprising one, two, three, four, five, six, or seven, but no more than ten modifications relative to the nucleotide sequence of SEQ ID NO: 4879; (ii) a loop region comprising the nucleotide sequence of SEQ ID NO: 4888, a nucleotide sequence substantially identical (e.g., having at least 70%, 75%, 80%, 85%, 90%, 95% 96%, 97%, 98%, 99% sequence identity) to SEQ ID NO: 4888, a nucleotide sequence comprising one, NO: 4888; or a nucleotide sequence comprising one, two, three, or four, but no more than five modifications relative to the nucleotide sequence of SEQ ID NO: 4888; and (iii) a 3′ flanking region of SEQ ID NO: 4898, a nucleotide sequence substantially identical (e.g., having at least 70%, 75%, 80%, 85%, 90%, 95% 96%, 97%, 98%, 99% sequence identity) to SEQ ID NO: 4898, a nucleotide sequence comprising one, two, three, four, five, six, or seven, but no more than ten different nucleotides relative to the nucleotide sequence of SEQ ID NO: 4898, a nucleotide sequence comprising one, two, three, four, five, six, or seven, but no more than ten modifications relative to the nucleotide sequence of SEQ ID NO: 4898.

[0723] In some embodiments, the modulatory polynucleotide comprises: (i) a 5′ flanking region comprising the nucleotide sequence of SEQ ID NO: 4354, a nucleotide sequence substantially identical (e.g., having at least 70%, 75%, 80%, 85%, 90%, 95% 96%, 97%, 98%, 99% sequence identity) to SEQ ID NO: 4354, a nucleotide sequence comprising one, two, three, four, five, six, or seven, but no more than ten different nucleotides relative to the nucleotide sequence of SEQ ID NO: 4354; or a nucleotide sequence comprising one, two, three, four, five, six, or seven, but no more than ten modifications relative to the nucleotide sequence of SEQ ID NO: 4354; (ii) a loop region comprising the nucleotide sequence of SEQ ID NO: 4363, a nucleotide sequence substantially identical (e.g., having at least 70%, 75%, 80%, 85%, 90%, 95% 96%, 97%, 98%, 99% sequence identity) to SEQ ID NO: 4363, a nucleotide sequence comprising one, two, three, or four, but no more than five different nucleotides relative to the nucleotide sequence of SEQ ID NO: 4363; or a nucleotide sequence comprising one, two, three, or four, but no more than five modifications relative to the nucleotide sequence of SEQ ID NO: 4363; and (iii) a 3′ flanking region of SEQ ID NO: 4373, a nucleotide sequence substantially identical (e.g., having at least 70%, 75%, 80%, 85%, 90%, 95% 96%, 97%, 98%, 99% sequence identity) to SEQ ID NO: 4373, a nucleotide sequence comprising one, two, three, four, five, six, or seven, but no more than ten different nucleotides relative to the nucleotide sequence of SEQ ID NO: 4373, a nucleotide sequence comprising one, two, three, four, five, six, or seven, but no more than ten modifications relative to the nucleotide sequence of SEQ ID NO: 4373.

[0724] In some embodiments, the encoded modulatory polynucleotide comprises: (i) a 5′ flanking region comprising the nucleotide sequence of SEQ ID NO: 4879, a nucleotide sequence substantially identical (e.g., having at least 70%, 75%, 80%, 85%, 90%, 95% 96%, 97%, 98%, 99% sequence identity) to SEQ ID NO: 4879, a nucleotide sequence comprising one, two, three, four, five, six, or seven, but no more than ten different nucleotides relative to the nucleotide sequence of SEQ ID NO: 4879; or a nucleotide sequence comprising one, two, three, four, five, six, or seven, but no more than ten modifications relative to the nucleotide sequence of SEQ ID NO: 4879; (ii) a loop region comprising the nucleotide sequence of SEQ ID NO: 4887, a nucleotide sequence substantially identical (e.g., having at least 70%, 75%, 80%, 85%, 90%, NO: 4887; or a nucleotide sequence comprising one, two, three, or four, but no more than five modifications relative to the nucleotide sequence of SEQ ID NO: 4887; and (iii) a 3′ flanking region of SEQ ID NO: 4899, a nucleotide sequence substantially identical (e.g., having at least 70%, 75%, 80%, 85%, 90%, 95% 96%, 97%, 98%, 99% sequence identity) to SEQ ID NO: 4899, a nucleotide sequence comprising one, two, three, four, five, six, or seven, but no more than ten different nucleotides relative to the nucleotide sequence of SEQ ID NO: 4899, a nucleotide sequence comprising one, two, three, four, five, six, or seven, but no more than ten modifications relative to the nucleotide sequence of SEQ ID NO: 4899.

[0725] In some embodiments, the encoded modulatory polynucleotide comprises: (i) a 5′ flanking region comprising the nucleotide sequence of SEQ ID NO: 4354, a nucleotide sequence substantially identical (e.g., having at least 70%, 75%, 80%, 85%, 90%, 95% 96%, 97%, 98%, 99% sequence identity) to SEQ ID NO: 4354, a nucleotide sequence comprising one, two, three, four, five, six, or seven, but no more than ten different nucleotides relative to the nucleotide sequence of SEQ ID NO: 4354; or a nucleotide sequence comprising one, two, three, four, five, six, or seven, but no more than ten modifications relative to the nucleotide sequence of SEQ ID NO: 4354; (ii) a loop region comprising the nucleotide sequence of SEQ ID NO: 4362, a nucleotide sequence substantially identical (e.g., having at least 70%, 75%, 80%, 85%, 90%, 95% 96%, 97%, 98%, 99% sequence identity) to SEQ ID NO: 4362, a nucleotide sequence comprising one, two, three, or four, but no more than five different nucleotides relative to the nucleotide sequence of SEQ ID NO: 4362, or a nucleotide sequence comprising one, two, three, or four, but no more than five modifications relative to the nucleotide sequence of SEQ ID NO: 4362; and (iii) a 3′ flanking region of SEQ ID NO: 4374, a nucleotide sequence substantially identical (e.g., having at least 70%, 75%, 80%, 85%, 90%, 95% 96%, 97%, 98%, 99% sequence identity) to SEQ ID NO: 4374, a nucleotide sequence comprising one, two, three, four, five, six, or seven, but no more than ten different nucleotides relative to the nucleotide sequence of SEQ ID NO: 4374, a nucleotide sequence comprising one, two, three, four, five, six, or seven, but no more than ten modifications relative to the nucleotide sequence of SEQ ID NO: 4374.

[0726] In some embodiments, the encoded modulatory polynucleotide comprises: (i) a 5′ flanking region comprising the nucleotide sequence of SEQ ID NO: 4880, a nucleotide sequence substantially identical (e.g., having at least 70%, 75%, 80%, 85%, 90%, 95% 96%, 97%, 98%, 99% sequence identity) to SEQ ID NO: 4880, a nucleotide sequence comprising one, two, three, four, five, six, or seven, but no more than ten different nucleotides relative to the nucleotide sequence of SEQ ID NO: 4880; or a nucleotide sequence comprising one, two, three, four, five, six, or seven, but no more than ten modifications relative to the nucleotide sequence of SEQ ID NO: 4880; (ii) a loop region comprising the nucleotide sequence of SEQ ID NO: 4891, a nucleotide sequence substantially identical (e.g., having at least 70%, 75%, 80%, 85%, 90%, 95% 96%, 97%, 98%, 99% sequence identity) to SEQ ID NO: 4891, a nucleotide sequence comprising one, NO: 4891; or a nucleotide sequence comprising one, two, three, or four, but no more than five modifications relative to the nucleotide sequence of SEQ ID NO: 4891; and (iii) a 3′ flanking region of SEQ ID NO: 4900, a nucleotide sequence substantially identical (e.g., having at least 70%, 75%, 80%, 85%, 90%, 95% 96%, 97%, 98%, 99% sequence identity) to SEQ ID NO: 4900, a nucleotide sequence comprising one, two, three, four, five, six, or seven, but no more than ten different nucleotides relative to the nucleotide sequence of SEQ ID NO: 4900, or a nucleotide sequence comprising one, two, three, four, five, six, or seven, but no more than ten modifications relative to SEQ ID NO: 4900.

[0727] In some embodiments, the encoded modulatory polynucleotide comprises: (i) a 5′ flanking region comprising the nucleotide sequence of SEQ ID NO: 4355, a nucleotide sequence substantially identical (e.g., having at least 70%, 75%, 80%, 85%, 90%, 95% 96%, 97%, 98%, 99% sequence identity) to SEQ ID NO: 4355, a nucleotide sequence comprising one, two, three, four, five, six, or seven, but no more than ten different nucleotides relative to the nucleotide sequence of SEQ ID NO: 4355; or a nucleotide sequence comprising one, two, three, four, five, six, or seven, but no more than ten modifications relative to the nucleotide sequence of SEQ ID NO: 4355; (ii) a loop region comprising the nucleotide sequence of SEQ ID NO: 4366, a nucleotide sequence substantially identical (e.g., having at least 70%, 75%, 80%, 85%, 90%, 95% 96%, 97%, 98%, 99% sequence identity) to SEQ ID NO: 4366, a nucleotide sequence comprising one, two, three, or four, but no more than five different nucleotides relative to the nucleotide sequence of SEQ ID NO: 4366; or a nucleotide sequence comprising one, two, three, or four, but no more than five modifications relative to the nucleotide sequence of SEQ ID NO: 4366; and (iii) a 3′ flanking region of SEQ ID NO: 4375, a nucleotide sequence substantially identical (e.g., having at least 70%, 75%, 80%, 85%, 90%, 95% 96%, 97%, 98%, 99% sequence identity) to SEQ ID NO: 4375, a nucleotide sequence comprising one, two, three, four, five, six, or seven, but no more than ten different nucleotides relative to the nucleotide sequence of SEQ ID NO: 4375, or a nucleotide sequence comprising one, two, three, four, five, six, or seven, but no more than ten modifications relative to SEQ ID NO: 4375.

[0728] In some embodiments, a molecular scaffold may comprise one or more linkers known in the art. The linkers may separate regions or one molecular scaffold from another. As a non-limiting example, the molecular scaffold or modulatory polynucleotide may be polycistronic.

Modulatory Polynucleotide Comprising the Molecular Scaffold and siRNA Molecule

[0729] In some embodiments, the modulatory polynucleotide comprises 5′ and 3′ flanking regions, loop region, and nucleic acid sequences encoding the sense strand sequence and the antisense strand sequence as described in Table 9A and Table 9B.

[0730] In some embodiments, the modulatory polynucleotide comprises the nucleotide sequence of any one of SEQ ID NOs: 4380-4409 or 5027-5050, or nucleotide sequence at least 70%, 75%, 80%, 85%, 90%, 92%, 95%, 96%, 97%, 987%, or 99% identical thereto. In some embodiments, the modulatory polynucleotide comprises a nucleotide sequence comprising at least one, two, three, four, five, six, or seven, but no more than ten different nucleotides relative to the nucleotide sequence of any one of SEQ ID NOs: 4380-4409 or 5027-5050. In some embodiments, the modulatory polynucleotide comprises a nucleotide sequence comprising at least one, two, three, four, five, six, or seven, but no more than ten modifications relative to the nucleotide sequence of any one of SEQ ID NOs: 4380-4409 or 5027-5050.

[0731] In some embodiments, the modulatory polynucleotide comprises the nucleotide sequence of SEQ ID NO: 4405, or nucleotide sequence at least 70%, 75%, 80%, 85%, 90%, 92%, 95%, 96%, 97%, 987%, or 99% identical thereto. In some embodiments, the modulatory polynucleotide comprises a nucleotide sequence comprising at least one, two, three, four, five, six, or seven, but no more than ten different nucleotides relative to the nucleotide sequence of SEQ ID NO: 4405. In some embodiments, the modulatory polynucleotide comprises a nucleotide sequence comprising at least one, two, three, four, five, six, or seven, but no more than ten modifications relative to the nucleotide sequence of SEQ ID NO: 4405.

[0732] In some embodiments, the modulatory polynucleotide comprises the nucleotide sequence of SEQ ID NO: 4408, or nucleotide sequence at least 70%, 75%, 80%, 85%, 90%, 92%, 95%, 96%, 97%, 987%, or 99% identical thereto. In some embodiments, the modulatory polynucleotide comprises a nucleotide sequence comprising at least one, two, three, four, five, six, or seven, but no more than ten different nucleotides relative to the nucleotide sequence of SEQ ID NO: 4408. In some embodiments, the modulatory polynucleotide comprises a nucleotide sequence comprising at least one, two, three, four, five, six, or seven, but no more than ten modifications relative to the nucleotide sequence of SEQ ID NO: 4408. In some embodiments, the modulatory polynucleotide comprises the nucleotide sequence of SEQ ID NO: 4408.

[0733] In some embodiments, the modulatory polynucleotide comprises the nucleotide sequence of SEQ ID NO: 4409, or nucleotide sequence at least 70%, 75%, 80%, 85%, 90%, 92%, 95%, 96%, 97%, 987%, or 99% identical thereto. In some embodiments, the modulatory polynucleotide comprises a nucleotide sequence comprising at least one, two, three, four, five, six, or seven, but no more than ten different nucleotides relative to the nucleotide sequence of SEQ ID NO: 4409. In some embodiments, the modulatory polynucleotide comprises a nucleotide sequence comprising at least one, two, three, four, five, six, or seven, but no more than ten modifications relative to the nucleotide sequence of SEQ ID NO: 4409. In some embodiments, the modulatory polynucleotide comprises the nucleotide sequence of SEQ ID NO: 4409.

[0734] In some embodiments, the modulatory polynucleotide comprises the nucleotide sequence of SEQ ID NO: 4390, or nucleotide sequence at least 70%, 75%, 80%, 85%, 90%, 92%, 95%, 96%, 97%, 987%, or 99% identical thereto. In some embodiments, the modulatory polynucleotide comprises a nucleotide sequence comprising at least one, two, three, four, five, six, or seven, but no more than ten different nucleotides relative to the nucleotide sequence of SEQ ID NO: 4390. In some embodiments, the modulatory polynucleotide comprises a nucleotide sequence comprising at least one, two, three, four, five, six, or seven, but no more than ten modifications relative to the nucleotide sequence of SEQ ID NO: 4390. In some embodiments, the modulatory polynucleotide comprises the nucleotide sequence of SEQ ID NO: 4390.

[0735] In some embodiments, the modulatory polynucleotide comprises the nucleotide sequence of SEQ ID NO: 4391, or nucleotide sequence at least 70%, 75%, 80%, 85%, 90%, 92%, 95%, 96%, 97%, 987%, or 99% identical thereto. In some embodiments, the modulatory polynucleotide comprises a nucleotide sequence comprising at least one, two, three, four, five, six, or seven, but no more than ten different nucleotides relative to the nucleotide sequence of SEQ ID NO: 4391. In some embodiments, the modulatory polynucleotide comprises a nucleotide sequence comprising at least one, two, three, four, five, six, or seven, but no more than ten modifications relative to the nucleotide sequence of SEQ ID NO: 4391. In some embodiments, the modulatory polynucleotide comprises the nucleotide sequence of SEQ ID NO: 4391.

[0736] In some embodiments, the modulatory polynucleotide comprises the nucleotide sequence of SEQ ID NO: 4393, or nucleotide sequence at least 70%, 75%, 80%, 85%, 90%, 92%, 95%, 96%, 97%, 987%, or 99% identical thereto. In some embodiments, the modulatory polynucleotide comprises a nucleotide sequence comprising at least one, two, three, four, five, six, or seven, but no more than ten different nucleotides relative to the nucleotide sequence of SEQ ID NO: 4393. In some embodiments, the modulatory polynucleotide comprises a nucleotide sequence comprising at least one, two, three, four, five, six, or seven, but no more than ten modifications relative to the nucleotide sequence of SEQ ID NO: 4393. In some embodiments, the modulatory polynucleotide comprises the nucleotide sequence of SEQ ID NO: 4393.

[0737] In some embodiments, the modulatory polynucleotide comprises the nucleotide sequence of SEQ ID NO: 4394, or nucleotide sequence at least 70%, 75%, 80%, 85%, 90%, 92%, 95%, 96%, 97%, 987%, or 99% identical thereto. In some embodiments, the modulatory polynucleotide comprises a nucleotide sequence comprising at least one, two, three, four, five, six, or seven, but no more than ten different nucleotides relative to the nucleotide sequence of SEQ ID NO: 4394. In some embodiments, the modulatory polynucleotide comprises a nucleotide sequence comprising at least one, two, three, four, five, six, or seven, but no more than ten modifications relative to the nucleotide sequence of SEQ ID NO: 4394. In some embodiments, the modulatory polynucleotide comprises the nucleotide sequence of SEQ ID NO: 4394.

[0738] It is understood that in some embodiments, any of the sequences in Tables 3-8, 9A, and 9B, or herein, can comprise a U nucleotide (uridine) in place of any of or all T nucleotides (thymine) within the sequence (e.g., an RNA molecule). It is also understood that in some embodiments, that any sequence provided herein can comprise a T nucleotide (thymine) in place of any of or all U nucleotides (uracil) within the sequence (e.g., a DNA molecule).

TABLE 9A
Exemplary Modulatory Polynucleotide Sequence Region (5′ to 3′)

| | 5′ Flanking to | | | | | |
|---|---|---|---|---|---|---|
| Modulatory | 3′ Flanking | 5′ Flanking | Passenger | Loop | Guide | 3′ Flanking |
| Polynucleotide | SEQ ID NO | SEQ ID NO | SEQ ID NO | SEQ ID NO | SEQ ID NO | SEQ ID NO |
| VOYTaumiR-102-530 | 4380 | 4354 | 4410 | 4362 | 4434 | 4373 |
| VOYTaumiR-102-556 | 4381 | 4354 | 4411 | 4362 | 4435 | 4373 |
| VOYTaumiR-102-564 | 4382 | 4354 | 4412 | 4362 | 4436 | 4373 |
| VOYTaumiR-102-579 | 4383 | 4354 | 4413 | 4362 | 4437 | 4373 |
| VOYTaumiR-102-586 | 4384 | 4354 | 4414 | 4362 | 4438 | 4373 |
| VOYTaumiR-102-582 | 5027 | 4354 | 5058 | 4362 | 5055 | 4373 |
| VOYTaumiR-102-587 | 5028 | 4354 | 5075 | 4362 | 5078 | 4373 |
| VOYTaumiR-102-552 | 5029 | 4354 | 5099 | 4362 | 5102 | 4373 |
| VOYTaumiR-102-549 | 5030 | 4354 | 5123 | 4362 | 5126 | 4373 |
| VOYTaumiR-104-530 | 4385 | 4354 | 4415 | 4362 | 4434 | 4373 |
| VOYTaumiR-104-556 | 4386 | 4354 | 4416 | 4362 | 4435 | 4373 |
| VOYTaumiR-104-564 | 4387 | 4354 | 4417 | 4362 | 4436 | 4373 |
| VOYTaumiR-104-579 | 4388 | 4354 | 4418 | 4362 | 4437 | 4373 |
| VOYTaumiR-104-586 | 4389 | 4354 | 4419 | 4362 | 4438 | 4373 |
| VOYTaumiR-104-582 | 5031 | 4354 | 5061 | 4362 | 5055 | 4373 |
| VOYTaumiR-104-587 | 5032 | 4354 | 5081 | 4362 | 5078 | 4373 |
| VOYTaumiR-104-552 | 5033 | 4354 | 5105 | 4362 | 5102 | 4373 |
| VOYTaumiR-104-549 | 5034 | 4354 | 5129 | 4362 | 5126 | 4373 |
| VOYTaumiR-109-530 | 4390 | 4354 | 4420 | 4363 | 4434 | 4373 |
| VOYTaumiR-109-556 | 4391 | 4354 | 4421 | 4363 | 4435 | 4373 |
| VOYTaumiR-109-564 | 4392 | 4354 | 4422 | 4363 | 4436 | 4373 |
| VOYTaumiR-109-579 | 4393 | 4354 | 4423 | 4363 | 4437 | 4373 |
| VOYTaumiR-109-586 | 4394 | 4354 | 4424 | 4363 | 4438 | 4373 |
| VOYTaumiR-109-582 | 5035 | 4354 | 5051 | 4363 | 5055 | 4373 |
| VOYTaumiR-109-587 | 5036 | 4354 | 5085 | 4363 | 5078 | 4373 |
| VOYTaumiR-109-552 | 5037 | 4354 | 5109 | 4363 | 5102 | 4373 |
| VOYTaumiR-109-549 | 5038 | 4354 | 5133 | 4363 | 5126 | 4373 |
| VOYTaumiR-114-530 | 4395 | 4354 | 4425 | 4362 | 4434 | 4374 |
| VOYTaumiR-114-556 | 4396 | 4354 | 4426 | 4362 | 4435 | 4374 |
| VOYTaumiR-114-564 | 4397 | 4354 | 4427 | 4362 | 4436 | 4374 |
| VOYTaumiR-114-579 | 4398 | 4354 | 4428 | 4362 | 4437 | 4374 |
| VOYTaumiR-114-586 | 4399 | 4354 | 4429 | 4362 | 4438 | 4374 |
| VOYTaumiR-114-582 | 5039 | 4354 | 5067 | 4362 | 5055 | 4374 |
| VOYTaumiR-114-587 | 5040 | 4354 | 5089 | 4362 | 5078 | 4374 |
| VOYTaumiR-114-552 | 5041 | 4354 | 5113 | 4362 | 5102 | 4374 |
| VOYTaumiR-114-549 | 5042 | 4354 | 5137 | 4362 | 5126 | 4374 |
| VOYTaumiR-116-530 | 4400 | 4354 | 4430 | 4362 | 4434 | 4374 |
| VOYTaumiR-116-556 | 4401 | 4354 | 4431 | 4362 | 4435 | 4374 |
| VOYTaumiR-116-564 | 4402 | 4354 | 4432 | 4362 | 4436 | 4374 |
| VOYTaumiR-116-579 | 4403 | 4354 | 4418 | 4362 | 4437 | 4374 |
| VOYTaumiR-116-586 | 4404 | 4354 | 4433 | 4362 | 4438 | 4374 |
| VOYTaumiR-116-582 | 5043 | 4354 | 5071 | 4362 | 5055 | 4374 |
| VOYTaumiR-116-587 | 5044 | 4354 | 5093 | 4362 | 5078 | 4374 |
| VOYTaumiR-116-552 | 5045 | 4354 | 5117 | 4362 | 5102 | 4374 |
| VOYTaumiR-116-549 | 5046 | 4354 | 5141 | 4362 | 5126 | 4374 |
| VOYTaumiR-127-530 | 4405 | 4355 | 4420 | 4366 | 4434 | 4375 |
| VOYTaumiR-127-556 | 4406 | 4355 | 4421 | 4366 | 4435 | 4375 |
| VOYTaumiR-127-564 | 4407 | 4355 | 4422 | 4366 | 4436 | 4375 |
| VOYTaumiR-127-579 | 4408 | 4355 | 4423 | 4366 | 4437 | 4375 |
| VOYTaumiR-127-586 | 4409 | 4355 | 4424 | 4366 | 4438 | 4375 |
| VOYTaumiR-127-582 | 5047 | 4355 | 5051 | 4366 | 5055 | 4375 |
| VOYTaumiR-127-587 | 5048 | 4355 | 5085 | 4366 | 5078 | 4375 |
| VOYTaumiR-127-552 | 5049 | 4355 | 5109 | 4366 | 5102 | 4375 |
| VOYTaumiR-127-549 | 5050 | 4355 | 5133 | 4366 | 5126 | 4375 |

TABLE 9B
Exemplary Modulatory Polynucleotides

| Name | SEQ ID NO | Description | Sequence |
|---|---|---|---|
| VOYTaumiR- | 4405 | 5′ flanking to 3′ | GAAGCAAAGAAGGGGCAGAGGGAGCCCGTGAGCTGAGTGGGCCAGG |
| 127-530 | | flanking | GACTGGGAGAAGGAGTGAGGAGGCAGGGCCGGCATGCCTCTGCTGC |
| | | | TGGCCAGAGACTGGAAGCGATGACAATCTGTCTGCACCTGTCACTA |
| | | | GTTTGTCATCGCTTCCAGTCTTTGGCCGTGTAGTGCTACCCAGCGC |
| | | | TGGCTGCCTCCTCAGCATTGCAATTCCTCTCCCATCTGGGCACCAG |
| | | | TCAGCTACCCTGGTGGGAATCTGGGTAGCC |
| | 4355 | 5′ flanking | GAAGCAAAGAAGGGGCAGAGGGAGCCCGTGAGCTGAGTGGGCCAGG |
| | | | GACTGGGAGAAGGAGTGAGGAGGCAGGGCCGGCATGCCTCTGCTGC |
| | | | TGGCCAGA |
| | 4420 | Passenger Strand | GACTGGAAGCGATGACAAT |
| | | (DNA) | |
| | 4497 | Passenger Strand | GACUGGAAGCGAUGACAAU |
| | | (RNA) | |
| | 4905 | Passenger Strand | GACTGGAAGCGATGACAATCT |
| | | (DNA) v2 | |
| | 4906 | Passenger Strand | GACUGGAAGCGAUGACAAUCU |
| | | (RNA) v2 | |
| | 4366 | Loop | GTCTGCACCTGTCACTAG |
| | 4434 | Guide Strand | TTTGTCATCGCTTCCAGTC |
| | | (DNA) | |
| | 4697 | Guide Strand | UUUGUCAUCGCUUCCAGUC |
| | | (RNA) | |
| | 4907 | Guide Strand | TTTGTCATCGCTTCCAGTCTT |
| | | (DNA) v2 | |
| | 4908 | Guide Strand | UUUGUCAUCGCUUCCAGUCUU |
| | | (RNA) v2 | |
| | 4375 | 3′ Flanking | TGGCCGTGTAGTGCTACCCAGCGCTGGCTGCCTCCTCAGCATTGCA |
| | | | ATTCCTCTCCCATCTGGGCACCAGTCAGCTACCCTGGTGGGAATCT |
| | | | GGGTAGCC |
| VOYTaumiR- | 4406 | 5′ flanking to 3′ | GAAGCAAAGAAGGGGCAGAGGGAGCCCGTGAGCTGAGTGGGCCAGG |
| 127-556 | | flanking | GACTGGGAGAAGGAGTGAGGAGGCAGGGCCGGCATGCCTCTGCTGC |
| | | | TGGCCAGACTTCCGCGAGAACGCCAATCTGTCTGCACCTGTCACTA |
| | | | GTTTGGCGTTCTCGCGGAAGTTTGGCCGTGTAGTGCTACCCAGCGC |
| | | | TGGCTGCCTCCTCAGCATTGCAATTCCTCTCCCATCTGGGCACCAG |
| | | | TCAGCTACCCTGGTGGGAATCTGGGTAGCC |
| | 4355 | 5′ flanking | GAAGCAAAGAAGGGGCAGAGGGAGCCCGTGAGCTGAGTGGGCCAGG |
| | | | GACTGGGAGAAGGAGTGAGGAGGCAGGGCCGGCATGCCTCTGCTGC |
| | | | TGGCCAGA |
| | 4421 | Passenger Strand | CTTCCGCGAGAACGCCAAT |
| | | (DNA) | |
| | 4508 | Passenger Strand | CUUCCGCGAGAACGCCAAU |
| | | (RNA) | |
| | 4909 | Passenger Strand | CTTCCGCGAGAACGCCAATCT |
| | | (DNA) v2 | |
| | 4910 | Passenger Strand | CUUCCGCGAGAACGCCAAUCU |
| | | (RNA) v2 | |
| | 4366 | Loop | GTCTGCACCTGTCACTAG |
| | 4435 | Guide Strand | TTTGGCGTTCTCGCGGAAG |
| | | (DNA) | |
| | 4701 | Guide Strand | UUUGGCGUUCUCGCGGAAG |
| | | (RNA) | |
| | 4911 | Guide Strand | TTTGGCGTTCTCGCGGAAGTT |
| | | (DNA) v2 | |
| | 4912 | Guide Strand | UUUGGCGUUCUCGCGGAAGUU |
| | | (RNA) v2 | |
| | 4375 | 3′ Flanking | TGGCCGTGTAGTGCTACCCAGCGCTGGCTGCCTCCTCAGCATTGCA |
| | | | ATTCCTCTCCCATCTGGGCACCAGTCAGCTACCCTGGTGGGAATCT |
| | | | GGGTAGCC |
| VOYTaumiR- | 4407 | 5′ flanking to 3′ | GAAGCAAAGAAGGGGCAGAGGGAGCCCGTGAGCTGAGTGGGCCAGG |
| 127-564 | | flanking | GACTGGGAGAAGGAGTGAGGAGGCAGGGCCGGCATGCCTCTGCTGC |
| | | | TGGCCAGAGCATCGACATGGTAGACTTCTGTCTGCACCTGTCACTA |
| | | | GTAGTCTACCATGTCGATGCTTTGGCCGTGTAGTGCTACCCAGCGC |
| | | | TGGCTGCCTCCTCAGCATTGCAATTCCTCTCCCATCTGGGCACCAG |
| | | | TCAGCTACCCTGGTGGGAATCTGGGTAGCC |
| | 4355 | 5′ flanking | GAAGCAAAGAAGGGGCAGAGGGAGCCCGTGAGCTGAGTGGGCCAGG |
| | | | GACTGGGAGAAGGAGTGAGGAGGCAGGGCCGGCATGCCTCTGCTGC |
| | | | TGGCCAGA |
| | 4422 | Passenger Strand | GCATCGACATGGTAGACTT |
| | | (DNA) | |
| | 4487 | Passenger Strand | GCAUCGACAUGGUAGACUU |
| | | (RNA) | |
| | 4913 | Passenger Strand | GCATCGACATGGTAGACTTCT |
| | | (DNA) v2 | |
| | 4914 | Passenger Strand | GCAUCGACAUGGUAGACUUCU |
| | | (RNA) v2 | |
| | 4366 | Loop | GTCTGCACCTGTCACTAG |
| | 4436 | Guide Strand | TAGTCTACCATGTCGATGC |
| | | (DNA) | |
| | 4691 | Guide Strand | UAGUCUACCAUGUCGAUGC |
| | | (RNA) | |
| | 4915 | Guide Strand | TAGTCTACCATGTCGATGCTT |
| | | (DNA) v2 | |
| | 4916 | Guide Strand | UAGUCUACCAUGUCGAUGCUU |
| | | (RNA) v2 | |
| | 4375 | 3′ Flanking | TGGCCGTGTAGTGCTACCCAGCGCTGGCTGCCTCCTCAGCATTGCA |
| | | | ATTCCTCTCCCATCTGGGCACCAGTCAGCTACCCTGGTGGGAATCT |
| | | | GGGTAGCC |
| VOYTaumiR- | 4408 | 5′ flanking to 3′ | GAAGCAAAGAAGGGGCAGAGGGAGCCCGTGAGCTGAGTGGGCCAGG |
| 127-579 | | flanking | GACTGGGAGAAGGAGTGAGGAGGCAGGGCCGGCATGCCTCTGCTGC |
| | | | TGGCCAGAGCTCCTCGCAGTTCGGTTTCTGTCTGCACCTGTCACTA |
| | | | GTAACCGAACTGCGAGGAGCTTTGGCCGTGTAGTGCTACCCAGCGC |
| | | | TGGCTGCCTCCTCAGCATTGCAATTCCTCTCCCATCTGGGCACCAG |
| | | | TCAGCTACCCTGGTGGGAATCTGGGTAGCC |
| | 4355 | 5′ flanking | GAAGCAAAGAAGGGGCAGAGGGAGCCCGTGAGCTGAGTGGGCCAGG |
| | | | GACTGGGAGAAGGAGTGAGGAGGCAGGGCCGGCATGCCTCTGCTGC |
| | | | TGGCCAGA |
| | 4423 | Passenger Strand | GCTCCTCGCAGTTCGGTTT |
| | | (DNA) | |
| | 4504 | Passenger Strand | GCUCCUCGCAGUUCGGUUU |
| | | (RNA) | |
| | 4917 | Passenger Strand | GCTCCTCGCAGTTCGGTTTCT |
| | | (DNA) v2 | |
| | 4918 | Passenger Strand | GCUCCUCGCAGUUCGGUUUCU |
| | | (RNA) v2 | |
| | 4366 | Loop | GTCTGCACCTGTCACTAG |
| | 4437 | Guide Strand | TAACCGAACTGCGAGGAGC |
| | | (DNA) | |
| | 4700 | Guide Strand | UAACCGAACUGCGAGGAGC |
| | | (RNA) | |
| | 4919 | Guide Strand | TAACCGAACTGCGAGGAGCTT |
| | | (DNA) v2 | |
| | 4920 | Guide Strand | UAACCGAACUGCGAGGAGCUU |
| | | (RNA) v2 | |
| | 4375 | 3′ Flanking | TGGCCGTGTAGTGCTACCCAGCGCTGGCTGCCTCCTCAGCATTGCA |
| | | | ATTCCTCTCCCATCTGGGCACCAGTCAGCTACCCTGGTGGGAATCT |
| | | | GGGTAGCC |
| VOYTaumiR- | 4409 | 5′ flanking to 3′ | GAAGCAAAGAAGGGGCAGAGGGAGCCCGTGAGCTGAGTGGGCCAGG |
| 127-586 | | flanking | GACTGGGAGAAGGAGTGAGGAGGCAGGGCCGGCATGCCTCTGCTGC |
| | | | TGGCCAGAGGCTTTGGCTCGGGACTTTCTGTCTGCACCTGTCACTA |
| | | | GTAAGTCCCGAGCCAAAGCCTTTGGCCGTGTAGTGCTACCCAGCGC |
| | | | TGGCTGCCTCCTCAGCATTGCAATTCCTCTCCCATCTGGGCACCAG |
| | | | TCAGCTACCCTGGTGGGAATCTGGGTAGCC |
| | 4355 | 5′ flanking | GAAGCAAAGAAGGGGCAGAGGGAGCCCGTGAGCTGAGTGGGCCAGG |
| | | | GACTGGGAGAAGGAGTGAGGAGGCAGGGCCGGCATGCCTCTGCTGC |
| | | | TGGCCAGA |
| | 4424 | Passenger Strand | GGCTTTGGCTCGGGACTTT |
| | | (DNA) | |
| | 4482 | Passenger Strand | GGCUUUGGCUCGGGACUUU |
| | | (RNA) | |
| | 4921 | Passenger Strand | GGCTTTGGCTCGGGACTTTCT |
| | | (DNA) v2 | |
| | 4922 | Passenger Strand | GGCUUUGGCUCGGGACUUUCU |
| | | (RNA) v2 | |
| | 4366 | Loop | GTCTGCACCTGTCACTAG |
| | 4438 | Guide Strand | TAAGTCCCGAGCCAAAGCC |
| | | (DNA) | |
| | 4690 | Guide Strand | UAAGUCCCGAGCCAAAGCC |
| | | (RNA) | |
| | 4923 | Guide Strand | TAAGTCCCGAGCCAAAGCCTT |
| | | (DNA) v2 | |
| | 4924 | Guide Strand | UAAGUCCCGAGCCAAAGCCUU |
| | | (RNA) v2 | |
| | 4375 | 3′ Flanking | TGGCCGTGTAGTGCTACCCAGCGCTGGCTGCCTCCTCAGCATTGCA |
| | | | ATTCCTCTCCCATCTGGGCACCAGTCAGCTACCCTGGTGGGAATCT |
| | | | GGGTAGCC |
| VOYTaumiR- | 5047 | 5′ flanking to 3′ | GAAGCAAAGAAGGGGCAGAGGGAGCCCGTGAGCTGAGTGGGCCAGG |
| 127-582 | | flanking | GACTGGGAGAAGGAGTGAGGAGGCAGGGCCGGCATGCCTCTGCTGC |
| | | | TGGCCAGACCTCGCAGTTCGGTTAATTCTGTCTGCACCTGTCACTA |
| | | | GTATTAACCGAACTGCGAGGTTTGGCCGTGTAGTGCTACCCAGCGC |
| | | | TGGCTGCCTCCTCAGCATTGCAATTCCTCTCCCATCTGGGCACCAG |
| | | | TCAGCTACCCTGGTGGGAATCTGGGTAGCC |
| | 4355 | 5′ flanking | GAAGCAAAGAAGGGGCAGAGGGAGCCCGTGAGCTGAGTGGGCCAGG |
| | | | GACTGGGAGAAGGAGTGAGGAGGCAGGGCCGGCATGCCTCTGCTGC |
| | | | TGGCCAGA |
| | 5051 | Passenger Strand | CCTCGCAGTTCGGTTAATT |
| | | (DNA) | |
| | 5052 | Passenger Strand | CCUCGCAGUUCGGUUAAUU |
| | | (RNA) | |
| | 5053 | Passenger Strand | CCTCGCAGTTCGGTTAATTCT |
| | | (DNA) v2 | |
| | 5054 | Passenger Strand | CCUCGCAGUUCGGUUAAUUCU |
| | | (RNA) v2 | |
| | 4366 | Loop | GTCTGCACCTGTCACTAG |
| | 5055 | Guide Strand | TATTAACCGAACTGCGAGG |
| | | (DNA) | |
| | 4694 | Guide Strand | UAUUAACCGAACUGCGAGG |
| | | (RNA) | |
| | 5056 | Guide Strand | TATTAACCGAACTGCGAGGTT |
| | | (DNA) v2 | |
| | 5057 | Guide Strand | UAUUAACCGAACUGCGAGGUU |
| | | (RNA) v2 | |
| | 4375 | 3′ Flanking | TGGCCGTGTAGTGCTACCCAGCGCTGGCTGCCTCCTCAGCATTGCA |
| | | | ATTCCTCTCCCATCTGGGCACCAGTCAGCTACCCTGGTGGGAATCT |
| | | | GGGTAGCC |
| VOYTaumiR- | 4380 | 5′ flanking to 3′ | GTGCTGGGCGGGGGGCGGCGGGCCCTCCCGCAGAACACCATGCGCT |
| 102-530 | | flanking | CTTCGGAAGACTGGAAGCGATGACAACCCTGTGACCTGGTTTGTCA |
| | | | TCGCTTCCAGTCTTCTGAGGAGCGCCTTGACAGCAGCCATGGGAGG |
| | | | GCCGCCCCCTACCTCAGTGA |
| | 4354 | 5′ flanking | GTGCTGGGCGGGGGGCGGCGGGCCCTCCCGCAGAACACCATGCGCT |
| | | | CTTCGGAA |
| | 4410 | Passenger Strand | GACTGGAAGCGATGACAAC |
| | | (DNA) | |
| | 4495 | Passenger Strand | GACUGGAAGCGAUGACAAC |
| | | (RNA) | |
| | 4925 | Passenger Strand | GACTGGAAGCGATGACAACCC |
| | | (DNA) v2 | |
| | 4926 | Passenger Strand | GACUGGAAGCGAUGACAACCC |
| | | (RNA) v2 | |
| | 4362 | Loop | TGTGACCTGG |
| | 4434 | Guide Strand | TTTGTCATCGCTTCCAGTC |
| | | (DNA) | |
| | 4697 | Guide Strand | UUUGUCAUCGCUUCCAGUC |
| | | (RNA) | |
| | 4907 | Guide Strand | TTTGTCATCGCTTCCAGTCTT |
| | | (DNA) v2 | |
| | 4908 | Guide Strand | UUUGUCAUCGCUUCCAGUCUU |
| | | (RNA) v2 | |
| | 4373 | 3′ Flanking | CTGAGGAGCGCCTTGACAGCAGCCATGGGAGGGCCGCCCCCTACCT |
| | | | CAGTGA |
| VOYTaumiR- | 4381 | 5′ flanking to 3′ | GTGCTGGGCGGGGGGCGGCGGGCCCTCCCGCAGAACACCATGCGCT |
| 102-556 | | flanking | CTTCGGAACTTCCGCGAGAACGCCAACCCTGTGACCTGGTTTGGCG |
| | | | TTCTCGCGGAAGTTCTGAGGAGCGCCTTGACAGCAGCCATGGGAGG |
| | | | GCCGCCCCCTACCTCAGTGA |
| | 4354 | 5′ flanking | GTGCTGGGCGGGGGGCGGCGGGCCCTCCCGCAGAACACCATGCGCT |
| | | | CTTCGGAA |
| | 4411 | Passenger Strand | CTTCCGCGAGAACGCCAAC |
| | | (DNA) | |
| | 4506 | Passenger Strand | CUUCCGCGAGAACGCCAAC |
| | | (RNA) | |
| | 4929 | Passenger Strand | CTTCCGCGAGAACGCCAACCC |
| | | (DNA) v2 | |
| | 4930 | Passenger Strand | CUUCCGCGAGAACGCCAACCC |
| | | (RNA) v2 | |
| | 4362 | Loop | TGTGACCTGG |
| | 4435 | Guide Strand | TTTGGCGTTCTCGCGGAAG |
| | | (DNA) | |
| | 4701 | Guide Strand | UUUGGCGUUCUCGCGGAAG |
| | | (RNA) | |
| | 4911 | Guide Strand | TTTGGCGTTCTCGCGGAAGTT |
| | | (DNA) v2 | |
| | 4912 | Guide Strand | UUUGGCGUUCUCGCGGAAGUU |
| | | (RNA) v2 | |
| | 4373 | 3′ Flanking | CTGAGGAGCGCCTTGACAGCAGCCATGGGAGGGCCGCCCCCTACCT |
| | | | CAGTGA |
| VOYTaumiR- | 4382 | 5′ flanking to 3′ | GTGCTGGGCGGGGGGCGGCGGGCCCTCCCGCAGAACACCATGCGCT |
| 102-564 | | flanking | CTTCGGAAGCATCGACATGGTAGACTCCCTGTGACCTGGTAGTCTA |
| | | | CCATGTCGATGCTTCTGAGGAGCGCCTTGACAGCAGCCATGGGAGG |
| | | | GCCGCCCCCTACCTCAGTGA |
| | 4354 | 5′ flanking | GTGCTGGGCGGGGGGCGGCGGGCCCTCCCGCAGAACACCATGCGCT |
| | | | CTTCGGAA |
| | 4412 | Passenger Strand | GCATCGACATGGTAGACTC |
| | | (DNA) | |
| | 4485 | Passenger Strand | GCAUCGACAUGGUAGACUC |
| | | (RNA) | |
| | 4933 | Passenger Strand | GCATCGACATGGTAGACTCCC |
| | | (DNA) v2 | |
| | 4934 | Passenger Strand | GCAUCGACAUGGUAGACUCCC |
| | | (RNA) v2 | |
| | 4362 | Loop | TGTGACCTGG |
| | 4436 | Guide Strand | TAGTCTACCATGTCGATGC |
| | | (DNA) | |
| | 4691 | Guide Strand | UAGUCUACCAUGUCGAUGC |
| | | (RNA) | |
| | 4915 | Guide Strand | TAGTCTACCATGTCGATGCTT |
| | | (DNA) v2 | |
| | 4916 | Guide Strand | UAGUCUACCAUGUCGAUGCUU |
| | | (RNA) v2 | |
| | 4373 | 3′ Flanking | CTGAGGAGCGCCTTGACAGCAGCCATGGGAGGGCCGCCCCCTACCT |
| | | | CAGTGA |
| VOYTaumiR- | 4383 | 5′ flanking to 3′ | GTGCTGGGGGGGGGGGGGCGGGCCCTCCCGCAGAACACCATGCGCT |
| 102-579 | | flanking | CTTCGGAAGCTCCTCGCAGTTCGGTTCCCTGTGACCTGGTAACCGA |
| | | | ACTGCGAGGAGCTTCTGAGGAGCGCCTTGACAGCAGCCATGGGAGG |
| | | | GCCGCCCCCTACCTCAGTGA |
| | 4354 | 5′ flanking | GTGCTGGGCGGGGGGCGGCGGGCCCTCCCGCAGAACACCATGCGCT |
| | | | CTTCGGAA |
| | 4413 | Passenger Strand | GCTCCTCGCAGTTCGGTTC |
| | | (DNA) | |
| | 4502 | Passenger Strand | GCUCCUCGCAGUUCGGUUC |
| | | (RNA) | |
| | 4937 | Passenger Strand | GCTCCTCGCAGTTCGGTTCCC |
| | | (DNA) v2 | |
| | 4938 | Passenger Strand | GCUCCUCGCAGUUCGGUUCCC |
| | | (RNA) v2 | |
| | 4362 | Loop | TGTGACCTGG |
| | 4437 | Guide Strand | TAACCGAACTGCGAGGAGC |
| | | (DNA) | |
| | 4700 | Guide Strand | UAACCGAACUGCGAGGAGC |
| | | (RNA) | |
| | 4919 | Guide Strand | TAACCGAACTGCGAGGAGCTT |
| | | (DNA) v2 | |
| | 4920 | Guide Strand | UAACCGAACUGCGAGGAGCUU |
| | | (RNA) v2 | |
| | 4373 | 3′ Flanking | CTGAGGAGCGCCTTGACAGCAGCCATGGGAGGGCCGCCCCCTACCT |
| | | | CAGTGA |
| VOYTaumiR- | 4384 | 5′ flanking to 3′ | GTGCTGGGCGGGGGGCGGCGGGCCCTCCCGCAGAACACCATGCGCT |
| 102-586 | | flanking | CTTCGGAAGGCTTTGGCTCGGGACTTCCCTGTGACCTGGTAAGTCC |
| | | | CGAGCCAAAGCCTTCTGAGGAGCGCCTTGACAGCAGCCATGGGAGG |
| | | | GCCGCCCCCTACCTCAGTGA |
| | 4354 | 5′ flanking | GTGCTGGGCGGGGGGCGGCGGGCCCTCCCGCAGAACACCATGCGCT |
| | | | CTTCGGAA |
| | 4414 | Passenger Strand | GGCTTTGGCTCGGGACTTC |
| | | (DNA) | |
| | 4480 | Passenger Strand | GGCUUUGGCUCGGGACUUC |
| | | (RNA) | |
| | 4941 | Passenger Strand | GGCTTTGGCTCGGGACTTCCC |
| | | (DNA) v2 | |
| | 4942 | Passenger Strand | GGCUUUGGCUCGGGACUUCCC |
| | | (RNA) v2 | |
| | 4362 | Loop | TGTGACCTGG |
| | 4438 | Guide Strand | TAAGTCCCGAGCCAAAGCC |
| | | (DNA) | |
| | 4690 | Guide Strand | UAAGUCCCGAGCCAAAGCC |
| | | (RNA) | |
| | 4923 | Guide Strand | TAAGTCCCGAGCCAAAGCCTT |
| | | (DNA) v2 | |
| | 4924 | Guide Strand | UAAGUCCCGAGCCAAAGCCUU |
| | | (RNA) v2 | |
| | 4373 | 3′ Flanking | CTGAGGAGCGCCTTGACAGCAGCCATGGGAGGGCCGCCCCCTACCT |
| | | | CAGTGA |
| VOYTaumiR- | 5027 | 5′ flanking to 3′ | GTGCTGGGCGGGGGGCGGCGGGCCCTCCCGCAGAACACCATGCGCT |
| 102-582 | | flanking | CTTCGGAACCTCGCAGTTCGGTTAATCCCTGTGACCTGGTATTAAC |
| | | | CGAACTGCGAGGTTCTGAGGAGCGCCTTGACAGCAGCCATGGGAGG |
| | | | GCCGCCCCCTACCTCAGTGA |
| | 4354 | 5′ flanking | GTGCTGGGCGGGGGGCGGCGGGCCCTCCCGCAGAACACCATGCGCT |
| | | | CTTCGGAA |
| | 5058 | Passenger Strand | CCTCGCAGTTCGGTTAATC |
| | | (DNA) | |
| | 4492 | Passenger Strand | CCUCGCAGUUCGGUUAAUC |
| | | (RNA) | |
| | 5059 | Passenger Strand | CCTCGCAGTTCGGTTAATCCC |
| | | (DNA) v2 | |
| | 5060 | Passenger Strand | CCUCGCAGUUCGGUUAAUCCC |
| | | (RNA) v2 | |
| | 4362 | Loop | TGTGACCTGG |
| | 5055 | Guide Strand | TATTAACCGAACTGCGAGG |
| | | (DNA) | |
| | 4694 | Guide Strand | UAUUAACCGAACUGCGAGG |
| | | (RNA) | |
| | 5056 | Guide Strand | TATTAACCGAACTGCGAGGTT |
| | | (DNA) v2 | |
| | 5057 | Guide Strand | UAUUAACCGAACUGCGAGGUU |
| | | (RNA) v2 | |
| | 4373 | 3′ Flanking | CTGAGGAGCGCCTTGACAGCAGCCATGGGAGGGCCGCCCCCTACCT |
| | | | CAGTGA |
| VOYTaumiR- | 4385 | 5′ flanking to 3′ | GTGCTGGGCGGGGGGCGGCGGGCCCTCCCGCAGAACACCATGCGCT |
| 104-530 | | flanking | CTTCGGAAGACTGGAAGCGATGACAAACCTGTGACCTGGTTTGTCA |
| | | | TCGCTTCCAGTCTTCTGAGGAGCGCCTTGACAGCAGCCATGGGAGG |
| | | | GCCGCCCCCTACCTCAGTGA |
| | 4354 | 5′ flanking | GTGCTGGGCGGGGGGCGGCGGGCCCTCCCGCAGAACACCATGCGCT |
| | | | CTTCGGAA |
| | 4415 | Passenger Strand | GACTGGAAGCGATGACAAA |
| | | (DNA) | |
| | 4496 | Passenger Strand | GACUGGAAGCGAUGACAAA |
| | | (RNA) | |
| | 4945 | Passenger Strand | GACTGGAAGCGATGACAAACC |
| | | (DNA) v2 | |
| | 4946 | Passenger Strand | GACUGGAAGCGAUGACAAACC |
| | | (RNA) v2 | |
| | 4362 | Loop | TGTGACCTGG |
| | 4434 | Guide Strand | TTTGTCATCGCTTCCAGTC |
| | | (DNA) | |
| | 4697 | Guide Strand | UUUGUCAUCGCUUCCAGUC |
| | | (RNA) | |
| | 4907 | Guide Strand | TTTGTCATCGCTTCCAGTCTT |
| | | (DNA) v2 | |
| | 4908 | Guide Strand | UUUGUCAUCGCUUCCAGUCUU |
| | | (RNA) v2 | |
| | 4373 | 3′ Flanking | CTGAGGAGCGCCTTGACAGCAGCCATGGGAGGGCCGCCCCCTACCT |
| | | | CAGTGA |
| VOYTaumiR- | 4386 | 5′ flanking to 3′ | GTGCTGGGCGGGGGGCGGCGGGCCCTCCCGCAGAACACCATGCGCT |
| 104-556 | | flanking | CTTCGGAACTTCCGCGAGAACGCCAAACCTGTGACCTGGTTTGGCG |
| | | | TTCTCGCGGAAGTTCTGAGGAGCGCCTTGACAGCAGCCATGGGAGG |
| | | | GCCGCCCCCTACCTCAGTGA |
| | 4354 | 5′ flanking | GTGCTGGGGGGGGGGGGGCGGGCCCTCCCGCAGAACACCATGCGCT |
| | | | CTTCGGAA |
| | 4416 | Passenger Strand | CTTCCGCGAGAACGCCAAA |
| | | (DNA) | |
| | 4507 | Passenger Strand | CUUCCGCGAGAACGCCAAA |
| | | (RNA) | |
| | 4949 | Passenger Strand | CTTCCGCGAGAACGCCAAACC |
| | | (DNA) v2 | |
| | 4950 | Passenger Strand | CUUCCGCGAGAACGCCAAACC |
| | | (RNA) v2 | |
| | 4362 | Loop | TGTGACCTGG |
| | 4435 | Guide Strand | TTTGGCGTTCTCGCGGAAG |
| | | (DNA) | |
| | 4701 | Guide Strand | UUUGGCGUUCUCGCGGAAG |
| | | (RNA) | |
| | 4911 | Guide Strand | TTTGGCGTTCTCGCGGAAGTT |
| | | (DNA) v2 | |
| | 4912 | Guide Strand | UUUGGCGUUCUCGCGGAAGUU |
| | | (RNA) v2 | |
| | 4373 | 3′ Flanking | CTGAGGAGCGCCTTGACAGCAGCCATGGGAGGGCCGCCCCCTACCT |
| | | | CAGTGA |
| VOYTaumiR- | 4387 | 5′ flanking to 3′ | GTGCTGGGCGGGGGGCGGCGGGCCCTCCCGCAGAACACCATGCGCT |
| 104-564 | | flanking | CTTCGGAAGCATCGACATGGTAGACTACCTGTGACCTGGTAGTCTA |
| | | | CCATGTCGATGCTTCTGAGGAGCGCCTTGACAGCAGCCATGGGAGG |
| | | | GCCGCCCCCTACCTCAGTGA |
| | 4354 | 5′ flanking | GTGCTGGGCGGGGGGCGGCGGGCCCTCCCGCAGAACACCATGCGCT |
| | | | CTTCGGAA |
| | 4417 | Passenger Strand | GCATCGACATGGTAGACTA |
| | | (DNA) | |
| | 4486 | Passenger Strand | GCAUCGACAUGGUAGACUA |
| | | (RNA) | |
| | 4953 | Passenger Strand | GCATCGACATGGTAGACTACC |
| | | (DNA) v2 | |
| | 4954 | Passenger Strand | GCAUCGACAUGGUAGACUACC |
| | | (RNA) v2 | |
| | 4362 | Loop | TGTGACCTGG |
| | 4436 | Guide Strand | TAGTCTACCATGTCGATGC |
| | | (DNA) | |
| | 4691 | Guide Strand | UAGUCUACCAUGUCGAUGC |
| | | (RNA) | |
| | 4915 | Guide Strand | TAGTCTACCATGTCGATGCTT |
| | | (DNA) v2 | |
| | 4916 | Guide Strand | UAGUCUACCAUGUCGAUGCUU |
| | | (RNA) v2 | |
| | 4373 | 3′ Flanking | CTGAGGAGCGCCTTGACAGCAGCCATGGGAGGGCCGCCCCCTACCT |
| | | | CAGTGA |
| VOYTaumiR- | 4388 | 5′ flanking to 3′ | GCGCTGGGCGGGGGGCGGCGGGCCCTCCCGCAGAACACCATGCGCT |
| 104-579 | | flanking | CTTCGGAAGCTCCTCGCAGTTCGGTTGCCTGTGACCTGGTAACCGA |
| | | | ACTGCGAGGAGCTTCTGAGGAGCGCCTTGACAGCAGCCATGGGAGG |
| | | | GCCGCCCCCTACCTCAGTGA |
| | 4354 | 5′ flanking | GTGCTGGGCGGGGGGCGGCGGGCCCTCCCGCAGAACACCATGCGCT |
| | | | CTTCGGAA |
| | 4418 | Passenger Strand | GCTCCTCGCAGTTCGGTTG |
| | | (DNA) | |
| | 4503 | Passenger Strand | GCUCCUCGCAGUUCGGUUG |
| | | (RNA) | |
| | 4957 | Passenger Strand | GCTCCTCGCAGTTCGGTTGCC |
| | | (DNA) v2 | |
| | 4958 | Passenger Strand | GCUCCUCGCAGUUCGGUUGCC |
| | | (RNA) v2 | |
| | 4362 | Loop | TGTGACCTGG |
| | 4437 | Guide Strand | TAACCGAACTGCGAGGAGC |
| | | (DNA) | |
| | 4700 | Guide Strand | UAACCGAACUGCGAGGAGC |
| | | (RNA) | |
| | 4919 | Guide Strand | TAACCGAACTGCGAGGAGCTT |
| | | (DNA) v2 | |
| | 4920 | Guide Strand | UAACCGAACUGCGAGGAGCUU |
| | | (RNA) v2 | |
| | 4373 | 3′ Flanking | CTGAGGAGCGCCTTGACAGCAGCCATGGGAGGGCCGCCCCCTACCT |
| | | | CAGTGA |
| VOYTaumiR- | 4389 | 5′ flanking to 3′ | GTGCTGGGCGGGGGGCGGCGGGCCCTCCCGCAGAACACCATGCGCT |
| 104-586 | | flanking | CTTCGGAAGGCTTTGGCTCGGGACTTACCTGTGACCTGGTAAGTCC |
| | | | CGAGCCAAAGCCTTCTGAGGAGCGCCTTGACAGCAGCCATGGGAGG |
| | | | GCCGCCCCCTACCTCAGTGA |
| | 4354 | 5′ flanking | GTGCTGGGCGGGGGGCGGCGGGCCCTCCCGCAGAACACCATGCGCT |
| | | | CTTCGGAA |
| | 4419 | Passenger Strand | GGCTTTGGCTCGGGACTTA |
| | | (DNA) | |
| | 4481 | Passenger Strand | GGCUUUGGCUCGGGACUUA |
| | | (RNA) | |
| | 4961 | Passenger Strand | GGCTTTGGCTCGGGACTTACC |
| | | (DNA) v2 | |
| | 4962 | Passenger Strand | GGCUUUGGCUCGGGACUUACC |
| | | (RNA) v2 | |
| | 4362 | Loop | TGTGACCTGG |
| | 4438 | Guide Strand | TAAGTCCCGAGCCAAAGCC |
| | | (DNA) | |
| | 4690 | Guide Strand | UAAGUCCCGAGCCAAAGCC |
| | | (RNA) | |
| | 4923 | Guide Strand | TAAGTCCCGAGCCAAAGCCTT |
| | | (DNA) v2 | |
| | 4924 | Guide Strand | UAAGUCCCGAGCCAAAGCCUU |
| | | (RNA) v2 | |
| | 4373 | 3′ Flanking | CTGAGGAGCGCCTTGACAGCAGCCATGGGAGGGCCGCCCCCTACCT |
| | | | CAGTGA |
| VOYTaumiR- | 5031 | 5′ flanking to 3′ | GTGCTGGGCGGGGGGCGGCGGGCCCTCCCGCAGAACACCATGCGCT |
| 104-582 | | flanking | CTTCGGAACCTCGCAGTTCGGTTAATACCTGTGACCTGGTATTAAC |
| | | | CGAACTGCGAGGTTCTGAGGAGCGCCTTGACAGCAGCCATGGGAGG |
| | | | GCCGCCCCCTACCTCAGTGA |
| | 4354 | 5′ flanking | GTGCTGGGCGGGGGGGGGGGGGCCCTCCCGCAGAACACCATGCGCT |
| | | | CTTCGGAA |
| | 5061 | Passenger Strand | CCTCGCAGTTCGGTTAATA |
| | | (DNA) | |
| | 5062 | Passenger Strand | CCUCGCAGUUCGGUUAAUA |
| | | (RNA) | |
| | 5063 | Passenger Strand | CCTCGCAGTTCGGTTAATACC |
| | | (DNA) v2 | |
| | 5064 | Passenger Strand | CCUCGCAGUUCGGUUAAUACC |
| | | (RNA) v2 | |
| | 4362 | Loop | TGTGACCTGG |
| | 5055 | Guide Strand | TATTAACCGAACTGCGAGG |
| | | (DNA) | |
| | 4694 | Guide Strand | UAUUAACCGAACUGCGAGG |
| | | (RNA) | |
| | 5056 | Guide Strand | TATTAACCGAACTGCGAGGTT |
| | | (DNA) v2 | |
| | 5057 | Guide Strand | UAUUAACCGAACUGCGAGGUU |
| | | (RNA) v2 | |
| | 4373 | 3′ Flanking | CTGAGGAGCGCCTTGACAGCAGCCATGGGAGGGCCGCCCCCTACCT |
| | | | CAGTGA |
| VOYTaumiR- | 4390 | 5′ flanking to 3′ | GTGCTGGGGGGGGGGGGGCGGGCCCTCCCGCAGAACACCATGCGCT |
| 109-530 | | flanking | CTTCGGAAGACTGGAAGCGATGACAATCCTGTGATTTGGTTTGTCA |
| | | | TCGCTTCCAGTCTTCTGAGGAGCGCCTTGACAGCAGCCATGGGAGG |
| | | | GCCGCCCCCTACCTCAGTGA |
| | 4354 | 5′ flanking | GTGCTGGGCGGGGGGCGGCGGGCCCTCCCGCAGAACACCATGCGCT |
| | | | CTTCGGAA |
| | 4420 | Passenger Strand | GACTGGAAGCGATGACAAT |
| | | (DNA) | |
| | 4497 | Passenger Strand | GACUGGAAGCGAUGACAAU |
| | | (RNA) | |
| | 4965 | Passenger Strand | GACTGGAAGCGATGACAATCC |
| | | (DNA) v2 | |
| | 4966 | Passenger Strand | GACUGGAAGCGAUGACAAUCC |
| | | (RNA) v2 | |
| | 4363 | Loop | TGTGATTTGG |
| | 4434 | Guide Strand | TTTGTCATCGCTTCCAGTC |
| | | (DNA) | |
| | 4697 | Guide Strand | UUUGUCAUCGCUUCCAGUC |
| | | (RNA) | |
| | 4907 | Guide Strand | TTTGTCATCGCTTCCAGTCTT |
| | | (DNA) v2 | |
| | 4908 | Guide Strand | UUUGUCAUCGCUUCCAGUCUU |
| | | (RNA) v2 | |
| | 4373 | 3′ Flanking | CTGAGGAGCGCCTTGACAGCAGCCATGGGAGGGCCGCCCCCTACCT |
| | | | CAGTGA |
| VOYTaumiR- | 4391 | 5′ flanking to 3′ | GTGCTGGGCGGGGGGCGGCGGGCCCTCCCGCAGAACACCATGCGCT |
| 109-556 | | flanking | CTTCGGAACTTCCGCGAGAACGCCAATCCTGTGATTTGGTTTGGCG |
| | | | TTCTCGCGGAAGTTCTGAGGAGCGCCTTGACAGCAGCCATGGGAGG |
| | | | GCCGCCCCCTACCTCAGTGA |
| | 4354 | 5′ flanking | GTGCTGGGCGGGGGGCGGCGGGCCCTCCCGCAGAACACCATGCGCT |
| | | | CTTCGGAA |
| | 4421 | Passenger Strand | CTTCCGCGAGAACGCCAAT |
| | | (DNA) | |
| | 4508 | Passenger Strand | CUUCCGCGAGAACGCCAAU |
| | | (RNA) | |
| | 4969 | Passenger Strand | CTTCCGCGAGAACGCCAATCC |
| | | (DNA) v2 | |
| | 4970 | Passenger Strand | CUUCCGCGAGAACGCCAAUCC |
| | | (RNA) v2 | |
| | 4363 | Loop | TGTGATTTGG |
| | 4435 | Guide Strand | TTTGGCGTTCTCGCGGAAG |
| | | (DNA) | |
| | 4701 | Guide Strand | UUUGGCGUUCUCGCGGAAG |
| | | (RNA) | |
| | 4911 | Guide Strand | TTTGGCGTTCTCGCGGAAGTT |
| | | (DNA) v2 | |
| | 4912 | Guide Strand | UUUGGCGUUCUCGCGGAAGUU |
| | | (RNA) v2 | |
| | 4373 | 3′ Flanking | CTGAGGAGCGCCTTGACAGCAGCCATGGGAGGGCCGCCCCCTACCT |
| | | | CAGTGA |
| VOYTaumiR- | 4392 | 5′ flanking to 3′ | GTGCTGGGCGGGGGGCGGCGGGCCCTCCCGCAGAACACCATGCGCT |
| 109-564 | | flanking | CTTCGGAAGCATCGACATGGTAGACTTCCTGTGATTTGGTAGTCTA |
| | | | CCATGTCGATGCTTCTGAGGAGCGCCTTGACAGCAGCCATGGGAGG |
| | | | GCCGCCCCCTACCTCAGTGA |
| | 4354 | 5′ flanking | GTGCTGGGCGGGGGGCGGCGGGCCCTCCCGCAGAACACCATGCGCT |
| | | | CTTCGGAA |
| | 4422 | Passenger Strand | GCATCGACATGGTAGACTT |
| | | (DNA) | |
| | 4487 | Passenger Strand | GCAUCGACAUGGUAGACUU |
| | | (RNA) | |
| | 4973 | Passenger Strand | GCATCGACATGGTAGACTTCC |
| | | (DNA) v2 | |
| | 4974 | Passenger Strand | GCAUCGACAUGGUAGACUUCC |
| | | (RNA) v2 | |
| | 4363 | Loop | TGTGATTTGG |
| | 4436 | Guide Strand | TAGTCTACCATGTCGATGC |
| | | (DNA) | |
| | 4691 | Guide Strand | UAGUCUACCAUGUCGAUGC |
| | | (RNA) | |
| | 4915 | Guide Strand | TAGTCTACCATGTCGATGCTT |
| | | (DNA) v2 | |
| | 4916 | Guide Strand | UAGUCUACCAUGUCGAUGCUU |
| | | (RNA) v2 | |
| | 4373 | 3′ Flanking | CTGAGGAGCGCCTTGACAGCAGCCATGGGAGGGCCGCCCCCTACCT |
| | | | CAGTGA |
| VOYTaumiR- | 4393 | 5′ flanking to 3′ | GTGCTGGGCGGGGGGCGGCGGGCCCTCCCGCAGAACACCATGCGCT |
| 109-579 | | flanking | CTTCGGAAGCTCCTCGCAGTTCGGTTTCCTGTGATTTGGTAACCGA |
| | | | ACTGCGAGGAGCTTCTGAGGAGCGCCTTGACAGCAGCCATGGGAGG |
| | | | GCCGCCCCCTACCTCAGTGA |
| | 4354 | 5′ flanking | GTGCTGGGCGGGGGGCGGCGGGCCCTCCCGCAGAACACCATGCGCT |
| | | | CTTCGGAA |
| | 4423 | Passenger Strand | GCTCCTCGCAGTTCGGTTT |
| | | (DNA) | |
| | 4504 | Passenger Strand | GCUCCUCGCAGUUCGGUUU |
| | | (RNA) | |
| | 4977 | Passenger Strand | GCTCCTCGCAGTTCGGTTTCC |
| | | (DNA) v2 | |
| | 4978 | Passenger Strand | GCUCCUCGCAGUUCGGUUUCC |
| | | (RNA) v2 | |
| | 4363 | Loop | TGTGATTTGG |
| | 4437 | Guide Strand | TAACCGAACTGCGAGGAGC |
| | | (DNA) | |
| | 4700 | Guide Strand | UAACCGAACUGCGAGGAGC |
| | | (RNA) | |
| | 4919 | Guide Strand | TAACCGAACTGCGAGGAGCTT |
| | | (DNA) v2 | |
| | 4920 | Guide Strand | UAACCGAACUGCGAGGAGCUU |
| | | (RNA) v2 | |
| | 4373 | 3′ Flanking | CTGAGGAGCGCCTTGACAGCAGCCATGGGAGGGCCGCCCCCTACCT |
| | | | CAGTGA |
| VOYTaumiR- | 4394 | 5′ flanking to 3′ | GTGCTGGGCGGGGGGCGGCGGGCCCTCCCGCAGAACACCATGCGCT |
| 109-586 | | flanking | CTTCGGAAGGCTTTGGCTCGGGACTTTCCTGTGATTTGGTAAGTCC |
| | | | CGAGCCAAAGCCTTCTGAGGAGCGCCTTGACAGCAGCCATGGGAGG |
| | | | GCCGCCCCCTACCTCAGTGA |
| | 4354 | 5′ flanking | GTGCTGGGCGGGGGGCGGCGGGCCCTCCCGCAGAACACCATGCGCT |
| | | | CTTCGGAA |
| | 4424 | Passenger Strand | GGCTTTGGCTCGGGACTTT |
| | | (DNA) | |
| | 4482 | Passenger Strand | GGCUUUGGCUCGGGACUUU |
| | | (RNA) | |
| | 4981 | Passenger Strand | GGCTTTGGCTCGGGACTTTCC |
| | | (DNA) v2 | |
| | 4982 | Passenger Strand | GGCUUUGGCUCGGGACUUUCC |
| | | (RNA) v2 | |
| | 4363 | Loop | TGTGATTTGG |
| | 4438 | Guide Strand | TAAGTCCCGAGCCAAAGCC |
| | | (DNA) | |
| | 4690 | Guide Strand | UAAGUCCCGAGCCAAAGCC |
| | | (RNA) | |
| | 4923 | Guide Strand | TAAGTCCCGAGCCAAAGCCTT |
| | | (DNA) v2 | |
| | 4924 | Guide Strand | UAAGUCCCGAGCCAAAGCCUU |
| | | (RNA) v2 | |
| | 4373 | 3′ Flanking | CTGAGGAGCGCCTTGACAGCAGCCATGGGAGGGCCGCCCCCTACCT |
| | | | CAGTGA |
| VOYTaumiR- | 5035 | 5′ flanking to 3′ | GTGCTGGGCGGGGGGGGGGGGGCCCTCCCGCAGAACACCATGCGCT |
| 109-582 | | flanking | CTTCGGAACCTCGCAGTTCGGTTAATTCCTGTGATTTGGTATTAAC |
| | | | CGAACTGCGAGGTTCTGAGGAGCGCCTTGACAGCAGCCATGGGAGG |
| | | | GCCGCCCCCTACCTCAGTGA |
| | 4354 | 5′ flanking | GTGCTGGGCGGGGGGCGGCGGGCCCTCCCGCAGAACACCATGCGCT |
| | | | CTTCGGAA |
| | 5051 | Passenger Strand | CCTCGCAGTTCGGTTAATT |
| | | (DNA) | |
| | 5052 | Passenger Strand | CCUCGCAGUUCGGUUAAUU |
| | | (RNA) | |
| | 5065 | Passenger Strand | CCTCGCAGTTCGGTTAATTCC |
| | | (DNA) v2 | |
| | 5066 | Passenger Strand | CCUCGCAGUUCGGUUAAUUCC |
| | | (RNA) v2 | |
| | 4363 | Loop | TGTGATTTGG |
| | 5055 | Guide Strand | TATTAACCGAACTGCGAGG |
| | | (DNA) | |
| | 4694 | Guide Strand | UAUUAACCGAACUGCGAGG |
| | | (RNA) | |
| | 5056 | Guide Strand | TATTAACCGAACTGCGAGGTT |
| | | (DNA) v2 | |
| | 5057 | Guide Strand | UAUUAACCGAACUGCGAGGUU |
| | | (RNA) v2 | |
| | 4373 | 3′ Flanking | CTGAGGAGCGCCTTGACAGCAGCCATGGGAGGGCCGCCCCCTACCT |
| | | | CAGTGA |
| VOYTaumiR- | 4395 | 5′ flanking to 3′ | GTGCTGGGCGGGGGGCGGCGGGCCCTCCCGCAGAACACCATGCGCT |
| 114-530 | | flanking | CTTCGGAAGACTGGAAGGGATGACAACCCTGTGACCTGGTTTGTCA |
| | | | TCGCTTCCAGTCTTCTGTGGAGCGCCTTGACAGCAGCCATGGGAGG |
| | | | GCCGCCCCCTACCTCAGTGA |
| | 4354 | 5′ flanking | GTGCTGGGCGGGGGGCGGCGGGCCCTCCCGCAGAACACCATGCGCT |
| | | | CTTCGGAA |
| | 4425 | Passenger Strand | GACTGGAAGGGATGACAAC |
| | | (DNA) | |
| | 4498 | Passenger Strand | GACUGGAAGGGAUGACAAC |
| | | (RNA) | |
| | 4985 | Passenger Strand | GACTGGAAGGGATGACAACCC |
| | | (DNA) v2 | |
| | 4986 | Passenger Strand | GACUGGAAGGGAUGACAACCC |
| | | (RNA) v2 | |
| | 4362 | Loop | TGTGACCTGG |
| | 4434 | Guide Strand | TTTGTCATCGCTTCCAGTC |
| | | (DNA) | |
| | 4697 | Guide Strand | UUUGUCAUCGCUUCCAGUC |
| | | (RNA) | |
| | 4907 | Guide Strand | TTTGTCATCGCTTCCAGTCTT |
| | | (DNA) v2 | |
| | 4908 | Guide Strand | UUUGUCAUCGCUUCCAGUCUU |
| | | (RNA) v2 | |
| | 4374 | 3′ Flanking | CTGTGGAGCGCCTTGACAGCAGCCATGGGAGGGCCGCCCCCTACCT |
| | | | CAGTGA |
| VOYTaumiR- | 4396 | 5′ flanking to 3′ | GTGCTGGGCGGGGGGCGGCGGGCCCTCCCGCAGAACACCATGCGCT |
| 114-556 | | flanking | CTTCGGAACTTCCGCGACAACGCCAACCCTGTGACCTGGTTTGGCG |
| | | | TTCTCGCGGAAGTTCTGTGGAGCGCCTTGACAGCAGCCATGGGAGG |
| | | | GCCGCCCCCTACCTCAGTGA |
| | 4354 | 5′ flanking | GTGCTGGGGGGGGGGGGCGGGCCCTCCCGCAGAACACCATGCGCT |
| | | | CTTCGGAA |
| | 4426 | Passenger Strand | CTTCCGCGACAACGCCAAC |
| | | (DNA) | |
| | 4509 | Passenger Strand | CUUCCGCGACAACGCCAAC |
| | | (RNA) | |
| | 4989 | Passenger Strand | CTTCCGCGACAACGCCAACCC |
| | | (DNA) v2 | |
| | 4990 | Passenger Strand | CUUCCGCGACAACGCCAACCC |
| | | (RNA) v2 | |
| | 4362 | Loop | TGTGACCTGG |
| | 4435 | Guide Strand | TTTGGCGTTCTCGCGGAAG |
| | | (DNA) | |
| | 4701 | Guide Strand | UUUGGCGUUCUCGCGGAAG |
| | | (RNA) | |
| | 4911 | Guide Strand | TTTGGCGTTCTCGCGGAAGTT |
| | | (DNA) v2 | |
| | 4912 | Guide Strand | UUUGGCGUUCUCGCGGAAGUU |
| | | (RNA) v2 | |
| | 4374 | 3′ Flanking | CTGTGGAGCGCCTTGACAGCAGCCATGGGAGGGCCGCCCCCTACCT |
| | | | CAGTGA |
| VOYTaumiR- | 4397 | 5′ flanking to 3′ | GTGCTGGGCGGGGGGCGGCGGGCCCTCCCGCAGAACACCATGCGCT |
| 114-564 | | flanking | CTTCGGAAGCATCGACAAGGTAGACTCCCTGTGACCTGGTAGTCTA |
| | | | CCATGTCGATGCTTCTGTGGAGCGCCTTGACAGCAGCCATGGGAGG |
| | | | GCCGCCCCCTACCTCAGTGA |
| | 4354 | 5′ flanking | GTGCTGGGCGGGGGGCGGCGGGCCCTCCCGCAGAACACCATGCGCT |
| | | | CTTCGGAA |
| | 4427 | Passenger Strand | GCATCGACAAGGTAGACTC |
| | | (DNA) | |
| | 4488 | Passenger Strand | GCAUCGACAAGGUAGACUC |
| | | (RNA) | |
| | 4993 | Passenger Strand | GCATCGACAAGGTAGACTCCC |
| | | (DNA) v2 | |
| | 4994 | Passenger Strand | GCAUCGACAAGGUAGACUCCC |
| | | (RNA) v2 | |
| | 4362 | Loop | TGTGACCTGG |
| | 4436 | Guide Strand | TAGTCTACCATGTCGATGC |
| | | (DNA) | |
| | 4691 | Guide Strand | UAGUCUACCAUGUCGAUGC |
| | | (RNA) | |
| | 4915 | Guide Strand | TAGTCTACCATGTCGATGCTT |
| | | (DNA) v2 | |
| | 4916 | Guide Strand | UAGUCUACCAUGUCGAUGCUU |
| | | (RNA) v2 | |
| | 4374 | 3′ Flanking | CTGTGGAGCGCCTTGACAGCAGCCATGGGAGGGCCGCCCCCTACCT |
| | | | CAGTGA |
| VOYTaumiR- | 4398 | 5′ flanking to 3′ | GTGCTGGGCGGGGGGCGGCGGGCCCTCCCGCAGAACACCATGCGCT |
| 114-579 | | flanking | CTTCGGAAGCTCCTCGCTGTTCGGTTCCCTGTGACCTGGTAACCGA |
| | | | ACTGCGAGGAGCTTCTGTGGAGCGCCTTGACAGCAGCCATGGGAGG |
| | | | GCCGCCCCCTACCTCAGTGA |
| | 4354 | 5′ flanking | GTGCTGGGCGGGGGGCGGCGGGCCCTCCCGCAGAACACCATGCGCT |
| | | | CTTCGGAA |
| | 4428 | Passenger Strand | GCTCCTCGCTGTTCGGTTC |
| | | (DNA) | |
| | 4505 | Passenger Strand | GCUCCUCGCUGUUCGGUUC |
| | | (RNA) | |
| | 4997 | Passenger Strand | GCTCCTCGCTGTTCGGTTCCC |
| | | (DNA) v2 | |
| | 4998 | Passenger Strand | GCUCCUCGCUGUUCGGUUCCC |
| | | (RNA) v2 | |
| | 4362 | Loop | TGTGACCTGG |
| | 4437 | Guide Strand | TAACCGAACTGCGAGGAGC |
| | | (DNA) | |
| | 4700 | Guide Strand | UAACCGAACUGCGAGGAGC |
| | | (RNA) | |
| | 4919 | Guide Strand | TAACCGAACTGCGAGGAGCTT |
| | | (DNA) v2 | |
| | 4920 | Guide Strand | UAACCGAACUGCGAGGAGCUU |
| | | (RNA) v2 | |
| | 4374 | 3′ Flanking | CTGTGGAGCGCCTTGACAGCAGCCATGGGAGGGCCGCCCCCTACCT |
| | | | CAGTGA |
| VOYTaumiR- | 4399 | 5′ flanking to 3′ | GTGCTGGGCGGGGGGCGGCGGGCCCTCCCGCAGAACACCATGCGCT |
| 114-586 | | flanking | CTTCGGAAGGCTTTGGCACGGGACTTCCCTGTGACCTGGTAAGTCC |
| | | | CGAGCCAAAGCCTTCTGTGGAGCGCCTTGACAGCAGCCATGGGAGG |
| | | | GCCGCCCCCTACCTCAGTGA |
| | 4354 | 5′ flanking | GTGCTGGGCGGGGGGCGGCGGGCCCTCCCGCAGAACACCATGCGCT |
| | | | CTTCGGAA |
| | 4429 | Passenger Strand | GGCTTTGGCACGGGACTTC |
| | | (DNA) | |
| | 4483 | Passenger Strand | GGCUUUGGCACGGGACUUC |
| | | (RNA) | |
| | 5001 | Passenger Strand | GGCTTTGGCACGGGACTTCCC |
| | | (DNA) v2 | |
| | 5002 | Passenger Strand | GGCUUUGGCACGGGACUUCCC |
| | | (RNA) v2 | |
| | 4362 | Loop | TGTGACCTGG |
| | 4438 | Guide Strand | TAAGTCCCGAGCCAAAGCC |
| | | (DNA) | |
| | 4690 | Guide Strand | UAAGUCCCGAGCCAAAGCC |
| | | (RNA) | |
| | 4923 | Guide Strand | TAAGTCCCGAGCCAAAGCCTT |
| | | (DNA) v2 | |
| | 4924 | Guide Strand | UAAGUCCCGAGCCAAAGCCUU |
| | | (RNA) v2 | |
| | 4374 | 3′ Flanking | CTGTGGAGCGCCTTGACAGCAGCCATGGGAGGGCCGCCCCCTACCT |
| | | | CAGTGA |
| VOYTaumiR- | 5039 | 5′ flanking to 3′ | GTGCTGGGCGGGGGGCGGCGGGCCCTCCCGCAGAACACCATGCGCT |
| 114-582 | | flanking | CTTCGGAACCTCGCAGTACGGTTAATCCCTGTGACCTGGTATTAAC |
| | | | CGAACTGCGAGGTTCTGTGGAGCGCCTTGACAGCAGCCATGGGAGG |
| | | | GCCGCCCCCTACCTCAGTGA |
| | 4354 | 5′ flanking | GTGCTGGGCGGGGGGCGGCGGGCCCTCCCGCAGAACACCATGCGCT |
| | | | CTTCGGAA |
| | 5067 | Passenger Strand | CCTCGCAGTACGGTTAATC |
| | | (DNA) | |
| | 5068 | Passenger Strand | CCUCGCAGUACGGUUAAUC |
| | | (RNA) | |
| | 5069 | Passenger Strand | CCTCGCAGTACGGTTAATCCC |
| | | (DNA) v2 | |
| | 5070 | Passenger Strand | CCUCGCAGUACGGUUAAUCCC |
| | | (RNA) v2 | |
| | 4362 | Loop | TGTGACCTGG |
| | 5055 | Guide Strand | TATTAACCGAACTGCGAGG |
| | | (DNA) | |
| | 4694 | Guide Strand | UAUUAACCGAACUGCGAGG |
| | | (RNA) | |
| | 5056 | Guide Strand | TATTAACCGAACTGCGAGGTT |
| | | (DNA) v2 | |
| | 5057 | Guide Strand | UAUUAACCGAACUGCGAGGUU |
| | | (RNA) v2 | |
| | 4374 | 3′ Flanking | CTGTGGAGCGCCTTGACAGCAGCCATGGGAGGGCCGCCCCCTACCT |
| | | | CAGTGA |
| VOYTaumiR- | 4400 | 5′ flanking to 3′ | GTGCTGGGCGGGGGGCGGCGGGCCCTCCCGCAGAACACCATGCGCT |
| 116-530 | | flanking | CTTCGGAAGACTGGAAGCGATGACAAGCCTGTGACCTGGTTTGTCA |
| | | | TCGCTTCCAGTCTTCTGTGGAGCGCCTTGACAGCAGCCATGGGAGG |
| | | | GCCGCCCCCTACCTCAGTGA |
| | 4354 | 5′ flanking | GTGCTGGGCGGGGGGCGGCGGGCCCTCCCGCAGAACACCATGCGCT |
| | | | CTTCGGAA |
| | 4430 | Passenger Strand | GACTGGAAGCGATGACAAG |
| | | (DNA) | |
| | 4499 | Passenger Strand | GACUGGAAGCGAUGACAAG |
| | | (RNA) | |
| | 5005 | Passenger Strand | GACTGGAAGCGATGACAAGCC |
| | | (DNA) v2 | |
| | 5006 | Passenger Strand | GACUGGAAGCGAUGACAAGCC |
| | | (RNA) v2 | |
| | 4362 | Loop | TGTGACCTGG |
| | 4434 | Guide Strand | TTTGTCATCGCTTCCAGTC |
| | | (DNA) | |
| | 4697 | Guide Strand | UUUGUCAUCGCUUCCAGUC |
| | | (RNA) | |
| | 4907 | Guide Strand | TTTGTCATCGCTTCCAGTCTT |
| | | (DNA) v2 | |
| | 4908 | Guide Strand | UUUGUCAUCGCUUCCAGUCUU |
| | | (RNA) v2 | |
| | 4374 | 3′ Flanking | CTGTGGAGCGCCTTGACAGCAGCCATGGGAGGGCCGCCCCCTACCT |
| | | | CAGTGA |
| VOYTaumiR- | 4401 | 5′ flanking to 3′ | GTGCTGGGCGGGGGGCGGCGGGCCCTCCCGCAGAACACCATGCGCT |
| 116-556 | | flanking | CTTCGGAACTTCCGCGAGAACGCCAAGCCTGTGACCTGGTTTGGCG |
| | | | TTCTCGCGGAAGTTCTGTGGAGCGCCTTGACAGCAGCCATGGGAGG |
| | | | GCCGCCCCCTACCTCAGTGA |
| | 4354 | 5′ flanking | GTGCTGGGCGGGGGGCGGCGGGCCCTCCCGCAGAACACCATGCGCT |
| | | | CTTCGGAA |
| | 4431 | Passenger Strand | CTTCCGCGAGAACGCCAAG |
| | | (DNA) | |
| | 4510 | Passenger Strand | CUUCCGCGAGAACGCCAAG |
| | | (RNA) | |
| | 5009 | Passenger Strand | CTTCCGCGAGAACGCCAAGCC |
| | | (DNA) v2 | |
| | 5010 | Passenger Strand | CUUCCGCGAGAACGCCAAGCC |
| | | (RNA) v2 | |
| | 4362 | Loop | TGTGACCTGG |
| | 4435 | Guide Strand | TTTGGCGTTCTCGCGGAAG |
| | | (DNA) | |
| | 4701 | Guide Strand | UUUGGCGUUCUCGCGGAAG |
| | | (RNA) | |
| | 4911 | Guide Strand | TTTGGCGTTCTCGCGGAAGTT |
| | | (DNA) v2 | |
| | 4912 | Guide Strand | UUUGGCGUUCUCGCGGAAGUU |
| | | (RNA) v2 | |
| | 4374 | 3′ Flanking | CTGTGGAGCGCCTTGACAGCAGCCATGGGAGGGCCGCCCCCTACCT |
| | | | CAGTGA |
| VOYTaumiR- | 4402 | 5′ flanking to 3′ | GTGCTGGGCGGGGGGCGGCGGGCCCTCCCGCAGAACACCATGCGCT |
| 116-564 | | flanking | CTTCGGAAGCATCGACATGGTAGACTGCCTGTGACCTGGTAGTCTA |
| | | | CCATGTCGATGCTTCTGTGGAGCGCCTTGACAGCAGCCATGGGAGG |
| | | | GCCGCCCCCTACCTCAGTGA |
| | 4354 | 5′ flanking | GTGCTGGGCGGGGGGCGGCGGGCCCTCCCGCAGAACACCATGCGCT |
| | | | CTTCGGAA |
| | 4432 | Passenger Strand | GCATCGACATGGTAGACTG |
| | | (DNA) | |
| | 4489 | Passenger Strand | GCAUCGACAUGGUAGACUG |
| | | (RNA) | |
| | 5013 | Passenger Strand | GCATCGACATGGTAGACTGCC |
| | | (DNA) v2 | |
| | 5014 | Passenger Strand | GCAUCGACAUGGUAGACUGCC |
| | | (RNA) v2 | |
| | 4362 | Loop | TGTGACCTGG |
| | 4436 | Guide Strand | TAGTCTACCATGTCGATGC |
| | | (DNA) | |
| | 4691 | Guide Strand | UAGUCUACCAUGUCGAUGC |
| | | (RNA) | |
| | 4915 | Guide Strand | TAGTCTACCATGTCGATGCTT |
| | | (DNA) v2 | |
| | 4916 | Guide Strand | UAGUCUACCAUGUCGAUGCUU |
| | | (RNA) v2 | |
| | 4374 | 3′ Flanking | CTGTGGAGCGCCTTGACAGCAGCCATGGGAGGGCCGCCCCCTACCT |
| | | | CAGTGA |
| VOYTaumiR- | 4403 | 5′ flanking to 3′ | GTGCTGGGCGGGGGGCGGCGGGCCCTCCCGCAGAACACCATGCGCT |
| 116-579 | | flanking | CTTCGGAAGCTCCTCGCAGTTCGGTTGCCTGTGACCTGGTAACCGA |
| | | | ACTGCGAGGAGCTTCTGTGGAGCGCCTTGACAGCAGCCATGGGAGG |
| | | | GCCGCCCCCTACCTCAGTGA |
| | 4354 | 5′ flanking | GTGCTGGGGGGGGGGGGGCGGGCCCTCCCGCAGAACACCATGCGCT |
| | | | CTTCGGAA |
| | 4418 | Passenger Strand | GCTCCTCGCAGTTCGGTTG |
| | | (DNA) | |
| | 4503 | Passenger Strand | GCUCCUCGCAGUUCGGUUG |
| | | (RNA) | |
| | 4957 | Passenger Strand | GCTCCTCGCAGTTCGGTTGCC |
| | | (DNA) v2 | |
| | 4958 | Passenger Strand | GCUCCUCGCAGUUCGGUUGCC |
| | | (RNA) v2 | |
| | 4362 | Loop | TGTGACCTGG |
| | 4437 | Guide Strand | TAACCGAACTGCGAGGAGC |
| | | (DNA) | |
| | 4700 | Guide Strand | UAACCGAACUGCGAGGAGC |
| | | (RNA) | |
| | 4919 | Guide Strand | TAACCGAACTGCGAGGAGCTT |
| | | (DNA) v2 | |
| | 4920 | Guide Strand | UAACCGAACUGCGAGGAGCUU |
| | | (RNA) v2 | |
| | 4374 | 3′ Flanking | CTGTGGAGCGCCTTGACAGCAGCCATGGGAGGGCCGCCCCCTACCT |
| | | | CAGTGA |
| VOYTaumiR- | 4404 | 5′ flanking to 3′ | GTGCTGGGCGGGGGGCGGCGGGCCCTCCCGCAGAACACCATGCGCT |
| | | flanking | CTTCGGAAGGCTTTGGCTCGGGACTTGCCTGTGACCTGGTAAGTCC |
| | | | CGAGCCAAAGCCTTCTGTGGAGCGCCTTGACAGCAGCCATGGGAGG |
| | | | GCCGCCCCCTACCTCAGTGA |
| 116-586 | 4354 | 5′ flanking | GTGCTGGGCGGGGGGCGGCGGGCCCTCCCGCAGAACACCATGCGCT |
| | | | CTTCGGAA |
| | 4433 | Passenger Strand | GGCTTTGGCTCGGGACTTG |
| | | (DNA) | |
| | 4484 | Passenger Strand | GGCUUUGGCUCGGGACUUG |
| | | (RNA) | |
| | 5021 | Passenger Strand | GGCTTTGGCTCGGGACTTGCC |
| | | (DNA) v2 | |
| | 5022 | Passenger Strand | GGCUUUGGCUCGGGACUUGCC |
| | | (RNA) v2 | |
| | 4362 | Loop | TGTGACCTGG |
| | 4438 | Guide Strand | TAAGTCCCGAGCCAAAGCC |
| | | (DNA) | |
| | 4690 | Guide Strand | UAAGUCCCGAGCCAAAGCC |
| | | (RNA) | |
| | 4923 | Guide Strand | TAAGTCCCGAGCCAAAGCCTT |
| | | (DNA) v2 | |
| | 4924 | Guide Strand | UAAGUCCCGAGCCAAAGCCUU |
| | | (RNA) v2 | |
| | 4374 | 3′ Flanking | CTGTGGAGCGCCTTGACAGCAGCCATGGGAGGGCCGCCCCCTACCT |
| | | | CAGTGA |
| VOYTaumiR- | 5043 | 5′ flanking to 3′ | GTGCTGGGCGGGGGGCGGCGGGCCCTCCCGCAGAACACCATGCGCT |
| 116-582 | | flanking | CTTCGGAACCTCGCAGTTCGGTTAATGCCTGTGACCTGGTATTAAC |
| | | | CGAACTGCGAGGTTCTGTGGAGCGCCTTGACAGCAGCCATGGGAGG |
| | | | GCCGCCCCCTACCTCAGTGA |
| | 4354 | 5′ flanking | GTGCTGGGCGGGGGGCGGCGGGCCCTCCCGCAGAACACCATGCGCT |
| | | | CTTCGGAA |
| | 5071 | Passenger Strand | CCTCGCAGTTCGGTTAATG |
| | | (DNA) | |
| | 5072 | Passenger Strand | CCUCGCAGUUCGGUUAAUG |
| | | (RNA) | |
| | 5073 | Passenger Strand | CCTCGCAGTTCGGTTAATGCC |
| | | (DNA) v2 | |
| | 5074 | Passenger Strand | CCUCGCAGUUCGGUUAAUGCC |
| | | (RNA) v2 | |
| | 4362 | Loop | TGTGACCTGG |
| | 5055 | Guide Strand | TATTAACCGAACTGCGAGG |
| | | (DNA) | |
| | 4694 | Guide Strand | UAUUAACCGAACUGCGAGG |
| | | (RNA) | |
| | 5056 | Guide Strand | TATTAACCGAACTGCGAGGTT |
| | | (DNA) v2 | |
| | 5057 | Guide Strand | UAUUAACCGAACUGCGAGGUU |
| | | (RNA) v2 | |
| | 4374 | 3′ Flanking | CTGTGGAGCGCCTTGACAGCAGCCATGGGAGGGCCGCCCCCTACCT |
| | | | CAGTGA |
| VOYTaumiR- | 5028 | 5′ flanking to 3′ | GTGCTGGGCGGGGGGCGGCGGGCCCTCCCGCAGAACACCATGCGCT |
| 102-587 | | flanking | CTTCGGAAGCTTTGGCTCGGGACTTCCCCTGTGACCTGGTGAAGTC |
| | | | CCGAGCCAAAGCTTCTGAGGAGCGCCTTGACAGCAGCCATGGGAGG |
| | | | GCCGCCCCCTACCTCAGTGA |
| | 4354 | 5′ flanking | GTGCTGGGCGGGGGGCGGCGGGCCCTCCCGCAGAACACCATGCGCT |
| | | | CTTCGGAA |
| | 5075 | Passenger Strand | GCTTTGGCTCGGGACTTCC |
| | | (DNA) | |
| | 4477 | Passenger Strand | GCUUUGGCUCGGGACUUCC |
| | | (RNA) | |
| | 5076 | Passenger Strand | GCTTTGGCTCGGGACTTCCCC |
| | | (DNA) v2 | |
| | 5077 | Passenger Strand | GCUUUGGCUCGGGACUUCCCC |
| | | (RNA) v2 | |
| | 4362 | Loop | TGTGACCTGG |
| | 5078 | Guide Strand | TGAAGTCCCGAGCCAAAGC |
| | | (DNA) | |
| | 4687 | Guide Strand | UGAAGUCCCGAGCCAAAGC |
| | | (RNA) | |
| | 5079 | Guide Strand | TGAAGTCCCGAGCCAAAGCTT |
| | | (DNA) v2 | |
| | 5080 | Guide Strand | UGAAGUCCCGAGCCAAAGCUU |
| | | (RNA) v2 | |
| | 4373 | 3′ Flanking | CTGAGGAGCGCCTTGACAGCAGCCATGGGAGGGCCGCCCCCTACCT |
| | | | CAGTGA |
| VOYTaumiR- | 5032 | 5′ flanking to 3′ | GTGCTGGGCGGGGGGCGGCGGGCCCTCCCGCAGAACACCATGCGCT |
| 104-587 | | flanking | CTTCGGAAGCTTTGGCTCGGGACTTCACCTGTGACCTGGTGAAGTC |
| | | | CCGAGCCAAAGCTTCTGAGGAGCGCCTTGACAGCAGCCATGGGAGG |
| | | | GCCGCCCCCTACCTCAGTGA |
| | 4354 | 5′ flanking | GTGCTGGGCGGGGGGCGGCGGGCCCTCCCGCAGAACACCATGCGCT |
| | | | CTTCGGAA |
| | 5081 | Passenger Strand | GCTTTGGCTCGGGACTTCA |
| | | (DNA) | |
| | 5082 | Passenger Strand | GCUUUGGCUCGGGACUUCA |
| | | (RNA) | |
| | 5083 | Passenger Strand | GCTTTGGCTCGGGACTTCACC |
| | | (DNA) v2 | |
| | 5084 | Passenger Strand | GCUUUGGCUCGGGACUUCACC |
| | | (RNA) v2 | |
| | 4362 | Loop | TGTGACCTGG |
| | 5078 | Guide Strand | TGAAGTCCCGAGCCAAAGC |
| | | (DNA) | |
| | 4687 | Guide Strand | UGAAGUCCCGAGCCAAAGC |
| | | (RNA) | |
| | 5079 | Guide Strand | TGAAGTCCCGAGCCAAAGCTT |
| | | (DNA) v2 | |
| | 5080 | Guide Strand | UGAAGUCCCGAGCCAAAGCUU |
| | | (RNA) v2 | |
| | 4373 | 3′ Flanking | CTGAGGAGCGCCTTGACAGCAGCCATGGGAGGGCCGCCCCCTACCT |
| | | | CAGTGA |
| VOYTaumiR- | 5036 | 5′ flanking to 3′ | GTGCTGGGCGGGGGGCGGCGGGCCCTCCCGCAGAACACCATGCGCT |
| 109-587 | | flanking | CTTCGGAAGCTTTGGCTCGGGACTTCTCCTGTGATTTGGTGAAGTC |
| | | | CCGAGCCAAAGCTTCTGAGGAGCGCCTTGACAGCAGCCATGGGAGG |
| | | | GCCGCCCCCTACCTCAGTGA |
| | 4354 | 5′ flanking | GTGCTGGGCGGGGGGCGGCGGGCCCTCCCGCAGAACACCATGCGCT |
| | | | CTTCGGAA |
| | 5085 | Passenger Strand | GCTTTGGCTCGGGACTTCT |
| | | (DNA) | |
| | 5086 | Passenger Strand | GCUUUGGCUCGGGACUUCU |
| | | (RNA) | |
| | 5087 | Passenger Strand | GCTTTGGCTCGGGACTTCTCC |
| | | (DNA) v2 | |
| | 5088 | Passenger Strand | GCUUUGGCUCGGGACUUCUCC |
| | | (RNA) v2 | |
| | 4363 | Loop | TGTGATTTGG |
| | 5078 | Guide Strand | TGAAGTCCCGAGCCAAAGC |
| | | (DNA) | |
| | 4687 | Guide Strand | UGAAGUCCCGAGCCAAAGC |
| | | (RNA) | |
| | 5079 | Guide Strand | TGAAGTCCCGAGCCAAAGCTT |
| | | (DNA) v2 | |
| | 5080 | Guide Strand | UGAAGUCCCGAGCCAAAGCUU |
| | | (RNA) v2 | |
| | 4373 | 3′ Flanking | CTGAGGAGCGCCTTGACAGCAGCCATGGGAGGGCCGCCCCCTACCT |
| | | | CAGTGA |
| VOYTaumiR- | 5040 | 5′ flanking to 3′ | GTGCTGGGCGGGGGGCGGCGGGCCCTCCCGCAGAACACCATGCGCT |
| 114-587 | | flanking | CTTCGGAAGCTTTGGCTGGGGACTTCCCCTGTGACCTGGTGAAGTC |
| | | | CCGAGCCAAAGCTTCTGTGGAGCGCCTTGACAGCAGCCATGGGAGG |
| | | | GCCGCCCCCTACCTCAGTGA |
| | 4354 | 5′ flanking | GTGCTGGGCGGGGGGCGGCGGGCCCTCCCGCAGAACACCATGCGCT |
| | | | CTTCGGAA |
| | 5089 | Passenger Strand | GCTTTGGCTGGGGACTTCC |
| | | (DNA) | |
| | 5090 | Passenger Strand | GCUUUGGCUGGGGACUUCC |
| | | (RNA) | |
| | 5091 | Passenger Strand | GCTTTGGCTGGGGACTTCCCC |
| | | (DNA) v2 | |
| | 5092 | Passenger Strand | GCUUUGGCUGGGGACUUCCCC |
| | | (RNA) v2 | |
| | 4362 | Loop | TGTGACCTGG |
| | 5078 | Guide Strand | TGAAGTCCCGAGCCAAAGC |
| | | (DNA) | |
| | 4687 | Guide Strand | UGAAGUCCCGAGCCAAAGC |
| | | (RNA) | |
| | 5079 | Guide Strand | TGAAGTCCCGAGCCAAAGCTT |
| | | (DNA) v2 | |
| | 5080 | Guide Strand | UGAAGUCCCGAGCCAAAGCUU |
| | | (RNA) v2 | |
| | 4374 | 3′ Flanking | CTGTGGAGCGCCTTGACAGCAGCCATGGGAGGGCCGCCCCCTACCT |
| | | | CAGTGA |
| VOYTaumiR- | 5044 | 5′ flanking to 3′ | GTGCTGGGCGGGGGGCGGCGGGCCCTCCCGCAGAACACCATGCGCT |
| 116-587 | | flanking | CTTCGGAAGCTTTGGCTCGGGACTTCGCCTGTGACCTGGTGAAGTC |
| | | | CCGAGCCAAAGCTTCTGTGGAGCGCCTTGACAGCAGCCATGGGAGG |
| | | | GCCGCCCCCTACCTCAGTGA |
| | 4354 | 5′ flanking | GTGCTGGGCGGGGGGCGGCGGGCCCTCCCGCAGAACACCATGCGCT |
| | | | CTTCGGAA |
| | 5093 | Passenger Strand | GCTTTGGCTCGGGACTTCG |
| | | (DNA) | |
| | 5094 | Passenger Strand | GCUUUGGCUCGGGACUUCG |
| | | (RNA) | |
| | 5095 | Passenger Strand | GCTTTGGCTCGGGACTTCGCC |
| | | (DNA) v2 | |
| | 5096 | Passenger Strand | GCUUUGGCUCGGGACUUCGCC |
| | | (RNA) v2 | |
| | 4362 | Loop | TGTGACCTGG |
| | 5078 | Guide Strand | TGAAGTCCCGAGCCAAAGC |
| | | (DNA) | |
| | 4687 | Guide Strand | UGAAGUCCCGAGCCAAAGC |
| | | (RNA) | |
| | 5079 | Guide Strand | TGAAGTCCCGAGCCAAAGCTT |
| | | (DNA) v2 | |
| | 5080 | Guide Strand | UGAAGUCCCGAGCCAAAGCUU |
| | | (RNA) v2 | |
| | 4374 | 3′ Flanking | CTGTGGAGCGCCTTGACAGCAGCCATGGGAGGGCCGCCCCCTACCT |
| | | | CAGTGA |
| VOYTaumiR- | 5048 | 5′ flanking to 3′ | GAAGCAAAGAAGGGGCAGAGGGAGCCCGTGAGCTGAGTGGGCCAGG |
| 127-587 | | flanking | GACTGGGAGAAGGAGTGAGGAGGCAGGGCCGGCATGCCTCTGCTGC |
| | | | TGGCCAGAGCTTTGGCTCGGGACTTCTCTGTCTGCACCTGTCACTA |
| | | | GTGAAGTCCCGAGCCAAAGCTTTGGCCGTGTAGTGCTACCCAGCGC |
| | | | TGGCTGCCTCCTCAGCATTGCAATTCCTCTCCCATCTGGGCACCAG |
| | | | TCAGCTACCCTGGTGGGAATCTGGGTAGCC |
| | 4355 | 5′ flanking | GAAGCAAAGAAGGGGCAGAGGGAGCCCGTGAGCTGAGTGGGCCAGG |
| | | | GACTGGGAGAAGGAGTGAGGAGGCAGGGCCGGCATGCCTCTGCTGC |
| | | | TGGCCAGA |
| | 5085 | Passenger Strand | GCTTTGGCTCGGGACTTCT |
| | | (DNA) | |
| | 5086 | Passenger Strand | GCUUUGGCUCGGGACUUCU |
| | | (RNA) | |
| | 5097 | Passenger Strand | GCTTTGGCTCGGGACTTCTCT |
| | | (DNA) v2 | |
| | 5098 | Passenger Strand | GCUUUGGCUCGGGACUUCUCU |
| | | (RNA) v2 | |
| | 4366 | Loop | GTCTGCACCTGTCACTAG |
| | 5078 | Guide Strand | TGAAGTCCCGAGCCAAAGC |
| | | (DNA) | |
| | 4687 | Guide Strand | UGAAGUCCCGAGCCAAAGC |
| | | (RNA) | |
| | 5079 | Guide Strand | TGAAGTCCCGAGCCAAAGCTT |
| | | (DNA) v2 | |
| | 5080 | Guide Strand | UGAAGUCCCGAGCCAAAGCUU |
| | | (RNA) v2 | |
| | 4375 | 3′ Flanking | TGGCCGTGTAGTGCTACCCAGCGCTGGCTGCCTCCTCAGCATTGCA |
| | | | ATTCCTCTCCCATCTGGGCACCAGTCAGCTACCCTGGTGGGAATCT |
| | | | GGGTAGCC |
| VOYTaumiR- | 5029 | 5′ flanking to 3′ | GTGCTGGGCGGGGGGCGGCGGGCCCTCCCGCAGAACACCATGCGCT |
| 102-552 | | flanking | CTTCGGAAAGCTGACCTTCCGCGAGACCCTGTGACCTGGTTCTCGC |
| | | | GGAAGGTCAGCTTTCTGAGGAGCGCCTTGACAGCAGCCATGGGAGG |
| | | | GCCGCCCCCTACCTCAGTGA |
| | 4354 | 5′ flanking | GTGCTGGGCGGGGGGCGGCGGGCCCTCCCGCAGAACACCATGCGCT |
| | | | CTTCGGAA |
| | 5099 | Passenger Strand | AGCTGACCTTCCGCGAGAC |
| | | (DNA) | |
| | 4494 | Passenger Strand | AGCUGACCUUCCGCGAGAC |
| | | (RNA) | |
| | 5100 | Passenger Strand | AGCTGACCTTCCGCGAGACCC |
| | | (DNA) v2 | |
| | 5101 | Passenger Strand | AGCUGACCUUCCGCGAGACCC |
| | | (RNA) v2 | |
| | 4362 | Loop | TGTGACCTGG |
| | 5102 | Guide Strand | TTCTCGCGGAAGGTCAGCT |
| | | (DNA) | |
| | 4696 | Guide Strand | UUCUCGCGGAAGGUCAGCU |
| | | (RNA) | |
| | 5103 | Guide Strand | TTCTCGCGGAAGGTCAGCTTT |
| | | (DNA) v2 | |
| | 5104 | Guide Strand | UUCUCGCGGAAGGUCAGCUUU |
| | | (RNA) v2 | |
| | 4373 | 3′ Flanking | CTGAGGAGCGCCTTGACAGCAGCCATGGGAGGGCCGCCCCCTACCT |
| | | | CAGTGA |
| VOYTaumiR- | 5033 | 5′ flanking to 3′ | GTGCTGGGCGGGGGGGGGGGGGCCCTCCCGCAGAACACCATGCGCT |
| 104-552 | | flanking | CTTCGGAAAGCTGACCTTCCGCGAGAACCTGTGACCTGGTTCTCGC |
| | | | GGAAGGTCAGCTTTCTGAGGAGCGCCTTGACAGCAGCCATGGGAGG |
| | | | GCCGCCCCCTACCTCAGTGA |
| | 4354 | 5′ flanking | GTGCTGGGCGGGGGGCGGCGGGCCCTCCCGCAGAACACCATGCGCT |
| | | | CTTCGGAA |
| | 5105 | Passenger Strand | AGCTGACCTTCCGCGAGAA |
| | | (DNA) | |
| | 5106 | Passenger Strand | AGCUGACCUUCCGCGAGAA |
| | | (RNA) | |
| | 5107 | Passenger Strand | AGCTGACCTTCCGCGAGAACC |
| | | (DNA) v2 | |
| | 5108 | Passenger Strand | AGCUGACCUUCCGCGAGAACC |
| | | (RNA) v2 | |
| | 4362 | Loop | TGTGACCTGG |
| | 5102 | Guide Strand | TTCTCGCGGAAGGTCAGCT |
| | | (DNA) | |
| | 4696 | Guide Strand | UUCUCGCGGAAGGUCAGCU |
| | | (RNA) | |
| | 5103 | Guide Strand | TTCTCGCGGAAGGTCAGCTTT |
| | | (DNA) v2 | |
| | 5104 | Guide Strand | UUCUCGCGGAAGGUCAGCUUU |
| | | (RNA) v2 | |
| | 4373 | 3′ Flanking | CTGAGGAGCGCCTTGACAGCAGCCATGGGAGGGCCGCCCCCTACCT |
| | | | CAGTGA |
| VOYTaumiR- | 5037 | 5′ flanking to 3′ | GTGCTGGGCGGGGGGGGGGGGGCCCTCCCGCAGAACACCATGCGCT |
| 109-552 | | flanking | CTTCGGAAAGCTGACCTTCCGCGAGATCCTGTGATTTGGTTCTCGC |
| | | | GGAAGGTCAGCTTTCTGAGGAGCGCCTTGACAGCAGCCATGGGAGG |
| | | | GCCGCCCCCTACCTCAGTGA |
| | 4354 | 5′ flanking | GTGCTGGGCGGGGGGCGGCGGGCCCTCCCGCAGAACACCATGCGCT |
| | | | CTTCGGAA |
| | 5109 | Passenger Strand | AGCTGACCTTCCGCGAGAT |
| | | (DNA) | |
| | 5110 | Passenger Strand | AGCUGACCUUCCGCGAGAU |
| | | (RNA) | |
| | 5111 | Passenger Strand | AGCTGACCTTCCGCGAGATCC |
| | | (DNA) v2 | |
| | 5112 | Passenger Strand | AGCUGACCUUCCGCGAGAUCC |
| | | (RNA) v2 | |
| | 4363 | Loop | TGTGATTTGG |
| | 5102 | Guide Strand | TTCTCGCGGAAGGTCAGCT |
| | | (DNA) | |
| | 4696 | Guide Strand | UUCUCGCGGAAGGUCAGCU |
| | | (RNA) | |
| | 5103 | Guide Strand | TTCTCGCGGAAGGTCAGCTTT |
| | | (DNA) v2 | |
| | 5104 | Guide Strand | UUCUCGCGGAAGGUCAGCUUU |
| | | (RNA) v2 | |
| | 4373 | 3′ Flanking | CTGAGGAGCGCCTTGACAGCAGCCATGGGAGGGCCGCCCCCTACCT |
| | | | CAGTGA |
| VOYTaumiR- | 5041 | 5′ flanking to 3′ | GTGCTGGGCGGGGGGCGGCGGGCCCTCCCGCAGAACACCATGCGCT |
| 114-552 | | flanking | CTTCGGAAAGCTGACCTACCGCGAGACCCTGTGACCTGGTTCTCGC |
| | | | GGAAGGTCAGCTTTCTGTGGAGCGCCTTGACAGCAGCCATGGGAGG |
| | | | GCCGCCCCCTACCTCAGTGA |
| | 4354 | 5′ flanking | GTGCTGGGCGGGGGGCGGCGGGCCCTCCCGCAGAACACCATGCGCT |
| | | | CTTCGGAA |
| | 5113 | Passenger Strand | AGCTGACCTACCGCGAGAC |
| | | (DNA) | |
| | 5114 | Passenger Strand | AGCUGACCUACCGCGAGAC |
| | | (RNA) | |
| | 5115 | Passenger Strand | AGCTGACCTACCGCGAGACCC |
| | | (DNA) v2 | |
| | 5116 | Passenger Strand | AGCUGACCUACCGCGAGACCC |
| | | (RNA) v2 | |
| | 4362 | Loop | TGTGACCTGG |
| | 5102 | Guide Strand | TTCTCGCGGAAGGTCAGCT |
| | | (DNA) | |
| | 4696 | Guide Strand | UUCUCGCGGAAGGUCAGCU |
| | | (RNA) | |
| | 5103 | Guide Strand | TTCTCGCGGAAGGTCAGCTTT |
| | | (DNA) v2 | |
| | 5104 | Guide Strand | UUCUCGCGGAAGGUCAGCUUU |
| | | (RNA) v2 | |
| | 4374 | 3′ Flanking | CTGTGGAGCGCCTTGACAGCAGCCATGGGAGGGCCGCCCCCTACCT |
| | | | CAGTGA |
| VOYTaumiR- | 5045 | 5′ flanking to 3′ | GTGCTGGGCGGGGGGCGGCGGGCCCTCCCGCAGAACACCATGCGCT |
| 116-552 | | flanking | CTTCGGAAAGCTGACCTTCCGCGAGAGCCTGTGACCTGGTTCTCGC |
| | | | GGAAGGTCAGCTTTCTGTGGAGCGCCTTGACAGCAGCCATGGGAGG |
| | | | GCCGCCCCCTACCTCAGTGA |
| | 4354 | 5′ flanking | GTGCTGGGGGGGGGGGGGCGGGCCCTCCCGCAGAACACCATGCGCT |
| | | | CTTCGGAA |
| | 5117 | Passenger Strand | AGCTGACCTTCCGCGAGAG |
| | | (DNA) | |
| | 5118 | Passenger Strand | AGCUGACCUUCCGCGAGAG |
| | | (RNA) | |
| | 5119 | Passenger Strand | AGCTGACCTTCCGCGAGAGCC |
| | | (DNA) v2 | |
| | 5120 | Passenger Strand | AGCUGACCUUCCGCGAGAGCC |
| | | (RNA) v2 | |
| | 4362 | Loop | TGTGACCTGG |
| | 5102 | Guide Strand | TTCTCGCGGAAGGTCAGCT |
| | | (DNA) | |
| | 4696 | Guide Strand | UUCUCGCGGAAGGUCAGCU |
| | | (RNA) | |
| | 5103 | Guide Strand | TTCTCGCGGAAGGTCAGCTTT |
| | | (DNA) v2 | |
| | 5104 | Guide Strand | UUCUCGCGGAAGGUCAGCUUU |
| | | (RNA) v2 | |
| | 4374 | 3′ Flanking | CTGTGGAGCGCCTTGACAGCAGCCATGGGAGGGCCGCCCCCTACCT |
| | | | CAGTGA |
| VOYTaumiR- | 5049 | 5′ flanking to 3′ | GAAGCAAAGAAGGGGCAGAGGGAGCCCGTGAGCTGAGTGGGCCAGG |
| 127-552 | | flanking | GACTGGGAGAAGGAGTGAGGAGGCAGGGCCGGCATGCCTCTGCTGC |
| | | | TGGCCAGAAGCTGACCTTCCGCGAGATCTGTCTGCACCTGTCACTA |
| | | | GTTCTCGCGGAAGGTCAGCTTTTGGCCGTGTAGTGCTACCCAGCGC |
| | | | TGGCTGCCTCCTCAGCATTGCAATTCCTCTCCCATCTGGGCACCAG |
| | | | TCAGCTACCCTGGTGGGAATCTGGGTAGCC |
| | 4355 | 5′ flanking | GAAGCAAAGAAGGGGCAGAGGGAGCCCGTGAGCTGAGTGGGCCAGG |
| | | | GACTGGGAGAAGGAGTGAGGAGGCAGGGCCGGCATGCCTCTGCTGC |
| | | | TGGCCAGA |
| | 5109 | Passenger Strand | AGCTGACCTTCCGCGAGAT |
| | | (DNA) | |
| | 5110 | Passenger Strand | AGCUGACCUUCCGCGAGAU |
| | | (RNA) | |
| | 5121 | Passenger Strand | AGCTGACCTTCCGCGAGATCT |
| | | (DNA) v2 | |
| | 5122 | Passenger Strand | AGCUGACCUUCCGCGAGAUCU |
| | | (RNA) v2 | |
| | 4366 | Loop | GTCTGCACCTGTCACTAG |
| | 5102 | Guide Strand | TTCTCGCGGAAGGTCAGCT |
| | | (DNA) | |
| | 4696 | Guide Strand | UUCUCGCGGAAGGUCAGCU |
| | | (RNA) | |
| | 5103 | Guide Strand | TTCTCGCGGAAGGTCAGCTTT |
| | | (DNA) v2 | |
| | 5104 | Guide Strand | UUCUCGCGGAAGGUCAGCUUU |
| | | (RNA) v2 | |
| | 4375 | 3′ Flanking | TGGCCGTGTAGTGCTACCCAGCGCTGGCTGCCTCCTCAGCATTGCA |
| | | | ATTCCTCTCCCATCTGGGCACCAGTCAGCTACCCTGGTGGGAATCT |
| | | | GGGTAGCC |
| VOYTaumiR- | 5030 | 5′ flanking to 3′ | GTGCTGGGCGGGGGGCGGCGGGCCCTCCCGCAGAACACCATGCGCT |
| 102-549 | | flanking | CTTCGGAAGCCGTCTTCCGCCAAGAGCCCTGTGACCTGGTCTCTTG |
| | | | GCGGAAGACGGCTTCTGAGGAGCGCCTTGACAGCAGCCATGGGAGG |
| | | | GCCGCCCCCTACCTCAGTGA |
| | 4354 | 5′ flanking | GTGCTGGGCGGGGGGCGGCGGGCCCTCCCGCAGAACACCATGCGCT |
| | | | CTTCGGAA |
| | 5123 | Passenger Strand | GCCGTCTTCCGCCAAGAGC |
| | | (DNA) | |
| | 4527 | Passenger Strand | GCCGUCUUCCGCCAAGAGC |
| | | (RNA) | |
| | 5124 | Passenger Strand | GCCGTCTTCCGCCAAGAGCCC |
| | | (DNA) v2 | |
| | 5125 | Passenger Strand | GCCGUCUUCCGCCAAGAGCCC |
| | | (RNA) v2 | |
| | 4362 | Loop | TGTGACCTGG |
| | 5126 | Guide Strand | TCTCTTGGCGGAAGACGGC |
| | | (DNA) | |
| | 4718 | Guide Strand | UCUCUUGGCGGAAGACGGC |
| | | (RNA) | |
| | 5127 | Guide Strand | TCTCTTGGCGGAAGACGGCTT |
| | | (DNA) v2 | |
| | 5128 | Guide Strand | UCUCUUGGCGGAAGACGGCUU |
| | | (RNA) v2 | |
| | 4373 | 3′ Flanking | CTGAGGAGCGCCTTGACAGCAGCCATGGGAGGGCCGCCCCCTACCT |
| | | | CAGTGA |
| VOYTaumiR- | 5034 | 5′ flanking to 3′ | GTGCTGGGCGGGGGGCGGCGGGCCCTCCCGCAGAACACCATGCGCT |
| 104-549 | | flanking | CTTCGGAAGCCGTCTTCCGCCAAGAGACCTGTGACCTGGTCTCTTG |
| | | | GCGGAAGACGGCTTCTGAGGAGCGCCTTGACAGCAGCCATGGGAGG |
| | | | GCCGCCCCCTACCTCAGTGA |
| | 4354 | 5′ flanking | GTGCTGGGCGGGGGGCGGCGGGCCCTCCCGCAGAACACCATGCGCT |
| | | | CTTCGGAA |
| | 5129 | Passenger Strand | GCCGTCTTCCGCCAAGAGA |
| | | (DNA) | |
| | 5130 | Passenger Strand | GCCGUCUUCCGCCAAGAGA |
| | | (RNA) | |
| | 5131 | Passenger Strand | GCCGTCTTCCGCCAAGAGACC |
| | | (DNA) v2 | |
| | 5132 | Passenger Strand | GCCGUCUUCCGCCAAGAGACC |
| | | (RNA) v2 | |
| | 4362 | Loop | TGTGACCTGG |
| | 5126 | Guide Strand | TCTCTTGGCGGAAGACGGC |
| | | (DNA) | |
| | 4718 | Guide Strand | UCUCUUGGCGGAAGACGGC |
| | | (RNA) | |
| | 5127 | Guide Strand | TCTCTTGGCGGAAGACGGCTT |
| | | (DNA) v2 | |
| | 5128 | Guide Strand | UCUCUUGGCGGAAGACGGCUU |
| | | (RNA) v2 | |
| | 4373 | 3′ Flanking | CTGAGGAGCGCCTTGACAGCAGCCATGGGAGGGCCGCCCCCTACCT |
| | | | CAGTGA |
| VOYTaumiR- | 5038 | 5′ flanking to 3′ | GTGCTGGGCGGGGGGCGGCGGGCCCTCCCGCAGAACACCATGCGCT |
| 109-549 | | flanking | CTTCGGAAGCCGTCTTCCGCCAAGAGTCCTGTGATTTGGTCTCTTG |
| | | | GCGGAAGACGGCTTCTGAGGAGCGCCTTGACAGCAGCCATGGGAGG |
| | | | GCCGCCCCCTACCTCAGTGA |
| | 4354 | 5′ flanking | GTGCTGGGCGGGGGGCGGCGGGCCCTCCCGCAGAACACCATGCGCT |
| | | | CTTCGGAA |
| | 5133 | Passenger Strand | GCCGTCTTCCGCCAAGAGT |
| | | (DNA) | |
| | 5134 | Passenger Strand | GCCGUCUUCCGCCAAGAGU |
| | | (RNA) | |
| | 5135 | Passenger Strand | GCCGTCTTCCGCCAAGAGTCC |
| | | (DNA) v2 | |
| | 5136 | Passenger Strand | GCCGUCUUCCGCCAAGAGUCC |
| | | (RNA) v2 | |
| | 4363 | Loop | TGTGATTTGG |
| | 5126 | Guide Strand | TCTCTTGGCGGAAGACGGC |
| | | (DNA) | |
| | 4718 | Guide Strand | UCUCUUGGCGGAAGACGGC |
| | | (RNA) | |
| | 5127 | Guide Strand | TCTCTTGGCGGAAGACGGCTT |
| | | (DNA) v2 | |
| | 5128 | Guide Strand | UCUCUUGGCGGAAGACGGCUU |
| | | (RNA) v2 | |
| | 4373 | 3′ Flanking | CTGAGGAGCGCCTTGACAGCAGCCATGGGAGGGCCGCCCCCTACCT |
| | | | CAGTGA |
| VOYTaumiR- | 5042 | 5′ flanking to 3′ | GTGCTGGGCGGGGGGCGGCGGGCCCTCCCGCAGAACACCATGCGCT |
| 114-549 | | flanking | CTTCGGAAGCCGTCTTCGGCCAAGAGCCCTGTGACCTGGTCTCTTG |
| | | | GCGGAAGACGGCTTCTGTGGAGCGCCTTGACAGCAGCCATGGGAGG |
| | | | GCCGCCCCCTACCTCAGTGA |
| | 4354 | 5′ flanking | GTGCTGGGCGGGGGGCGGCGGGCCCTCCCGCAGAACACCATGCGCT |
| | | | CTTCGGAA |
| | 5137 | Passenger Strand | GCCGTCTTCGGCCAAGAGC |
| | | (DNA) | |
| | 5138 | Passenger Strand | GCCGUCUUCGGCCAAGAGC |
| | | (RNA) | |
| | 5139 | Passenger Strand | GCCGTCTTCGGCCAAGAGCCC |
| | | (DNA) v2 | |
| | 5140 | Passenger Strand | GCCGUCUUCGGCCAAGAGCCC |
| | | (RNA) v2 | |
| | 4362 | Loop | TGTGACCTGG |
| | 5126 | Guide Strand | TCTCTTGGCGGAAGACGGC |
| | | (DNA) | |
| | 4718 | Guide Strand | UCUCUUGGCGGAAGACGGC |
| | | (RNA) | |
| | 5127 | Guide Strand | TCTCTTGGCGGAAGACGGCTT |
| | | (DNA) v2 | |
| | 5128 | Guide Strand | UCUCUUGGCGGAAGACGGCUU |
| | | (RNA) v2 | |
| | 4374 | 3′ Flanking | CTGTGGAGCGCCTTGACAGCAGCCATGGGAGGGCCGCCCCCTACCT |
| | | | CAGTGA |
| VOYTaumiR- | 5046 | 5′ flanking to 3′ | GTGCTGGGGGGGGGGGGGCGGGCCCTCCCGCAGAACACCATGCGCT |
| 116-549 | | flanking | CTTCGGAAGCCGTCTTCCGCCAAGAGGCCTGTGACCTGGTCTCTTG |
| | | | GCGGAAGACGGCTTCTGTGGAGCGCCTTGACAGCAGCCATGGGAGG |
| | | | GCCGCCCCCTACCTCAGTGA |
| | 4354 | 5′ flanking | GTGCTGGGCGGGGGGCGGCGGGCCCTCCCGCAGAACACCATGCGCT |
| | | | CTTCGGAA |
| | 5141 | Passenger Strand | GCCGTCTTCCGCCAAGAGG |
| | | (DNA) | |
| | 5142 | Passenger Strand | GCCGUCUUCCGCCAAGAGG |
| | | (RNA) | |
| | 5143 | Passenger Strand | GCCGTCTTCCGCCAAGAGGCC |
| | | (DNA) v2 | |
| | 5144 | Passenger Strand | GCCGUCUUCCGCCAAGAGGCC |
| | | (RNA) v2 | |
| | 4362 | Loop | TGTGACCTGG |
| | 5126 | Guide Strand | TCTCTTGGCGGAAGACGGC |
| | | (DNA) | |
| | 4718 | Guide Strand | UCUCUUGGCGGAAGACGGC |
| | | (RNA) | |
| | 5127 | Guide Strand | TCTCTTGGCGGAAGACGGCTT |
| | | (DNA) v2 | |
| | 5128 | Guide Strand | UCUCUUGGCGGAAGACGGCUU |
| | | (RNA) v2 | |
| | 4374 | 3′ Flanking | CTGTGGAGCGCCTTGACAGCAGCCATGGGAGGGCCGCCCCCTACCT |
| | | | CAGTGA |
| VOYTaumiR- | 5050 | 5′ flanking to 3′ | GAAGCAAAGAAGGGGCAGAGGGAGCCCGTGAGCTGAGTGGGCCAGG |
| 127-549 | | flanking | GACTGGGAGAAGGAGTGAGGAGGCAGGGCCGGCATGCCTCTGCTGC |
| | | | TGGCCAGAGCCGTCTTCCGCCAAGAGTCTGTCTGCACCTGTCACTA |
| | | | GTCTCTTGGCGGAAGACGGCTTTGGCCGTGTAGTGCTACCCAGCGC |
| | | | TGGCTGCCTCCTCAGCATTGCAATTCCTCTCCCATCTGGGCACCAG |
| | | | TCAGCTACCCTGGTGGGAATCTGGGTAGCC |
| | 4355 | 5′ flanking | GAAGCAAAGAAGGGGCAGAGGGAGCCCGTGAGCTGAGTGGGCCAGG |
| | | | GACTGGGAGAAGGAGTGAGGAGGCAGGGCCGGCATGCCTCTGCTGC |
| | | | TGGCCAGA |
| | 5133 | Passenger Strand | GCCGTCTTCCGCCAAGAGT |
| | | (DNA) | |
| | 5134 | Passenger Strand | GCCGUCUUCCGCCAAGAGU |
| | | (RNA) | |
| | 5145 | Passenger Strand | GCCGTCTTCCGCCAAGAGTCT |
| | | (DNA) v2 | |
| | 5146 | Passenger Strand | GCCGUCUUCCGCCAAGAGUCU |
| | | (RNA) v2 | |
| | 4366 | Loop | GTCTGCACCTGTCACTAG |
| | 5126 | Guide Strand | TCTCTTGGCGGAAGACGGC |
| | | (DNA) | |
| | 4718 | Guide Strand | UCUCUUGGCGGAAGACGGC |
| | | (RNA) | |
| | 5127 | Guide Strand | TCTCTTGGCGGAAGACGGCTT |
| | | (DNA) v2 | |
| | 5128 | Guide Strand | UCUCUUGGCGGAAGACGGCUU |
| | | (RNA) v2 | |
| | 4375 | 3′ Flanking | TGGCCGTGTAGTGCTACCCAGCGCTGGCTGCCTCCTCAGCATTGCA |
| | | | ATTCCTCTCCCATCTGGGCACCAGTCAGCTACCCTGGTGGGAATCT |
| | | | GGGTAGCC |

### AAV Particles Comprising Modulatory Polynucleotides

[0739] In some embodiments, the AAV particle comprises a viral genome comprising or encoding a modulatory polynucleotide. In such embodiments, a viral genome comprises or encodes a modulatory polynucleotide, e.g., an encoded modulatory polynucleotide comprising a passenger and guide strand for targeting a MAPT gene, mRNA, or protein described herein, is replicated and packaged into a viral particle. A target cell transduced with a viral particle comprising a modulatory polynucleotide may express the encoded sense and/or antisense sequences in a single cell.

[0740] Non-limiting examples of ITR to ITR sequences of AAV particles comprising a viral genome comprising a modulatory polynucleotide sequence are described, e.g., in Tables 10A, 10B, 11-18, and 26.

TABLE 10A
Exemplary Sequences of AAV Viral Genomes

| ITR to ITR | | Modulatory |
|---|---|---|
| Construct | ITR to ITR | Polynucleotide |
| Name | SEQ ID NO | SEQ ID NO |
| VOYTAU1 | 4439 | 4380 |
| VOYTAU2 | 4440 | 4381 |
| VOYTAU3 | 4441 | 4382 |
| VOYTAU4 | 4442 | 4383 |
| VOYTAU5 | 4443 | 4384 |
| VOYTAU6 | 4444 | 4385 |
| VOYTAU7 | 4445 | 4386 |
| VOYTAU8 | 4446 | 4387 |
| VOYTAU9 | 4447 | 4388 |
| VOYTAU10 | 4448 | 4389 |
| VOYTAU11 | 4449 | 4390 |
| VOYTAU12 | 4450 | 4391 |
| VOYTAU13 | 4451 | 4392 |
| VOYTAU14 | 4452 | 4393 |
| VOYTAU15 | 4453 | 4394 |
| VOYTAU16 | 4454 | 4395 |
| VOYTAU17 | 4455 | 4396 |
| VOYTAU18 | 4456 | 4397 |
| VOYTAU19 | 4457 | 4398 |
| VOYTAU20 | 4458 | 4399 |
| VOYTAU21 | 4459 | 4400 |
| VOYTAU22 | 4460 | 4401 |
| VOYTAU23 | 4461 | 4402 |
| VOYTAU24 | 4462 | 4403 |
| VOYTAU25 | 4463 | 4404 |
| VOYTAU26 | 4464 | 4405 |
| VOYTAU27 | 4465 | 4406 |
| VOYTAU28 | 4466 | 4407 |
| VOYTAU29 | 4467 | 4408 |
| VOYTAU30 | 4468 | 4409 |
| VOYTAU31 | 5149 | 5047 |
| VOYTAU32 | 5150 | 5048 |
| VOYTAU33 | 5151 | 5049 |
| VOYTAU34 | 5152 | 5050 |
| VOYTAU35 | 5153 | 5043 |
| VOYTAU36 | 5154 | 5044 |
| VOYTAU37 | 5155 | 5045 |
| VOYTAU38 | 5156 | 5046 |
| VOYTAU39 | 5157 | 5039 |
| VOYTAU40 | 5158 | 5040 |
| VOYTAU41 | 5159 | 5041 |
| VOYTAU42 | 5160 | 5042 |
| VOYTAU43 | 5161 | 5035 |
| VOYTAU44 | 5162 | 5036 |
| VOYTAU45 | 5163 | 5037 |
| VOYTAU46 | 5164 | 5038 |
| VOYTAU47 | 5165 | 5031 |
| VOYTAU48 | 5166 | 5032 |
| VOYTAU49 | 5167 | 5033 |
| VOYTAU50 | 5168 | 5034 |
| VOYTAU51 | 5169 | 5027 |
| VOYTAU52 | 5170 | 5028 |
| VOYTAU53 | 5171 | 5029 |
| VOYTAU54 | 5172 | 5030 |
| VOYTAU55 | 5173 | 4405 |
| VOYTAU56 | 5174 | 4380 |
| VOYTAU57 | 5175 | 4381 |
| VOYTAU58 | 5176 | 4383 |
| VOYTAU59 | 5177 | 4384 |
| VOYTAU60 | 5178 | 4385 |
| VOYTAU61 | 5179 | 4386 |
| VOYTAU62 | 5180 | 4388 |
| VOYTAU63 | 5181 | 4389 |
| VOYTAU64 | 5182 | 4390 |
| VOYTAU65 | 5183 | 4391 |
| VOYTAU66 | 5184 | 4393 |
| VOYTAU67 | 5185 | 4394 |
| VOYTAU68 | 5186 | 4395 |
| VOYTAU69 | 5187 | 4396 |
| VOYTAU70 | 5188 | 4398 |
| VOYTAU71 | 5189 | 4399 |
| VOYTAU72 | 5190 | 4400 |
| VOYTAU73 | 5191 | 4401 |
| VOYTAU74 | 5192 | 4403 |
| VOYTAU75 | 5193 | 4404 |
| VOYTAU76 | 5194 | 4406 |
| VOYTAU77 | 5195 | 4408 |
| VOYTAU78 | 5196 | 4409 |

TABLE 10B
Exemplary Sequences of AAV Viral Genomes

| Name | SEQ ID NO | Sequence |
|---|---|---|
| VOYTAU55 | 5173 | CTGCGCGCTCGCTCGCTCACTGAGGCCGCCCGGGCAAAGCCCGGGCGTCGGGCGACCTTTGG |
| | | TCGCCCGGCCTCAGTGAGCGAGCGAGCGCGCAGAGAGGGAGTGTAGCCATGCTCTAGGAAGA |
| | | TCAATTCAATTCACGCGTCGACATTGATTATTGACTAGTTATTAATAGTAATCAATTACGGG |
| | | GTCATTAGTTCATAGCCCATATATGGAGTTCCGCGTTACATAACTTACGGTAAATGGCCCGC |
| | | CTGGCTGACCGCCCAACGACCCCCGCCCATTGACGTCAATAATGACGTATGTTCCCATAGTA |
| | | ACGCCAATAGGGACTTTCCATTGACGTCAATGGGTGGAGTATTTACGGTAAACTGCCCACTT |
| | | GGCAGTACATCAAGTGTATCATATGCCAAGTACGCCCCCTATTGACGTCAATGACGGTAAAT |
| | | GGCCCGCCTGGCATTATGCCCAGTACATGACCTTATGGGACTTTCCTACTTGGCAGTACATC |
| | | TACGTATTAGTCATCGCTATTACCATGTCGAGGCCACGTTCTGCTTCACTCTCCCCATCTCC |
| | | CCCCCCTCCCCACCCCCAATTTTGTATTTATTTATTTTTTAATTATTTTGTGCAGCGATGGG |
| | | GGCGGGGGGGGGGGGCGCGCGCCAGGCGGGGCGGGGCGGGGCGAGGGGCGGGGCGGGGCGAG |
| | | GCGGAGAGGTGCGGCGGCAGCCAATCAGAGCGGCGCGCTCCGAAAGTTTCCTTTTATGGCGA |
| | | GGCGGCGGCGGCGGCGGCCCTATAAAAAGCGAAGCGCGCGGCGGGCGGGAGCAAGCTTCGTT |
| | | TAGTGAACCGTCAGATCGCCTGGAGACGCCATCCACGCTGTTTTGACCTCCATAGAAGACAC |
| | | CGGGACCGATCCAGCCTCCGCGGATTCGAATCCCGGCCGGGAACGGTGCATTGGAACGCGGA |
| | | TTCCCCGTGCCAAGAGTGACGTAAGTACCGCCTATAGAGTCTATAGGCCCACAAAAAATGCT |
| | | TTCTTCTTTTAATATACTTTTTTGTTTATCTTATTTCTAATACTTTCCCTAATCTCTTTCTT |
| | | TCAGGGCAATAATGATACAATGTATCATGCCTCTTTGCACCATTCTAAAGAATAACAGTGAT |
| | | AATTTCTGGGTTAAGGCAATAGCAATATTTCTGCATATAAATATTTCTGCATATAAATTGTA |
| | | ACTGATGTAAGAGGTTTCATATTGCTAATAGCAGCTACAATCCAGCTACCATTCTGCTTTTA |
| | | TTTTATGGTTGGGATAAGGCTGGATTATTCTGAGTCCAAGCTAGGCCCTTTTGCTAATCATG |
| | | TTCATACCTCTTATCTTCCTCCCACAGCTCCTGGGCAACGTGCTGGTCTGTGTGCTGGCCCA |
| | | TCACTTTGGCAAAGAATTGGGATTCGAACCGGTGAAGCAAAGAAGGGGCAGAGGGAGCCCGT |
| | | GAGCTGAGTGGGCCAGGGACTGGGAGAAGGAGTGAGGAGGCAGGGCCGGCATGCCTCTGCTG |
| | | CTGGCCAGAGACTGGAAGCGATGACAATCTGTCTGCACCTGTCACTAGTTTGTCATCGCTTC |
| | | CAGTCTTTGGCCGTGTAGTGCTACCCAGCGCTGGCTGCCTCCTCAGCATTGCAATTCCTCTC |
| | | CCATCTGGGCACCAGTCAGCTACCCTGGTGGGAATCTGGGTAGCCCTCGAGGGGTGGCATCC |
| | | CTGTGACCCCTCCCCAGTGCCTCTCCTGGCCCTGGAAGTTGCCACTCCAGTGCCCACCAGCC |
| | | TTGTCCTAATAAAATTAAGTTGCATCATTTTGTCTGACTAGGTGTCCTTCTATAATATTATG |
| | | GGGTGGAGGGGGGTGGTATGGAGCAAGGGGCAAGTTGGGAAGACAACCTGTAGGGCCTGCGG |
| | | GGTCTATTGGGAACCAAGCTGGAGTGCAGTGGCACAATCTTGGCTCACTGCAATCTCCGCCT |
| | | CCTGGGTTCAAGCGATTCTCCTGCCTCAGCCTCCCGAGTTGTTGGGATTCCAGGCATGCATG |
| | | ACCAGGCTCAGCTAATTTTTGTTTTTTTGGTAGAGACGGGGTTTCACCATATTGGCCAGGCT |
| | | GGTCTCCAACTCCTAATCTCAGGTGATCTACCCACCTTGGCCTCCCAAATTGCTGGGATTAC |
| | | AGGCGTGAACCACTGCTCCCTTCCCTGTCCTTATCGATGCCTAGGGTTAATCATTAACTACA |
| | | AGGAACCCCTAGTGATGGAGTTGGCCACTCCCTCTCTGCGCGCTCGCTCGCTCACTGAGGCC |
| | | GGGCGACCAAAGGTCGCCCGACGCCCGGGCTTTGCCCGGGCGGCCTCAGTGAGCGAGCGAGC |
| | | GCGCAG |
| VOYTAU56 | 5174 | CTGCGCGCTCGCTCGCTCACTGAGGCCGCCCGGGCAAAGCCCGGGCGTCGGGCGACCTTTGG |
| | | TCGCCCGGCCTCAGTGAGCGAGCGAGCGCGCAGAGAGGGAGTGTAGCCATGCTCTAGGAAGA |
| | | TCAATTCAATTCACGCGTCGACATTGATTATTGACTAGTTATTAATAGTAATCAATTACGGG |
| | | GTCATTAGTTCATAGCCCATATATGGAGTTCCGCGTTACATAACTTACGGTAAATGGCCCGC |
| | | CTGGCTGACCGCCCAACGACCCCCGCCCATTGACGTCAATAATGACGTATGTTCCCATAGTA |
| | | ACGCCAATAGGGACTTTCCATTGACGTCAATGGGTGGAGTATTTACGGTAAACTGCCCACTT |
| | | GGCAGTACATCAAGTGTATCATATGCCAAGTACGCCCCCTATTGACGTCAATGACGGTAAAT |
| | | GGCCCGCCTGGCATTATGCCCAGTACATGACCTTATGGGACTTTCCTACTTGGCAGTACATC |
| | | TACGTATTAGTCATCGCTATTACCATGTCGAGGCCACGTTCTGCTTCACTCTCCCCATCTCC |
| | | CCCCCCTCCCCACCCCCAATTTTGTATTTATTTATTTTTTAATTATTTTGTGCAGCGATGGG |
| | | GGCGGGGGGGGGGGGCGCGCGCCAGGCGGGGCGGGGCGGGGCGAGGGGCGGGGCGGGGCGAG |
| | | GCGGAGAGGTGCGGCGGCAGCCAATCAGAGCGGCGCGCTCCGAAAGTTTCCTTTTATGGCGA |
| | | GGCGGCGGCGGCGGCGGCCCTATAAAAAGCGAAGCGCGCGGCGGGCGGGAGCAAGCTTCGTT |
| | | TAGTGAACCGTCAGATCGCCTGGAGACGCCATCCACGCTGTTTTGACCTCCATAGAAGACAC |
| | | CGGGACCGATCCAGCCTCCGCGGATTCGAATCCCGGCCGGGAACGGTGCATTGGAACGCGGA |
| | | TTCCCCGTGCCAAGAGTGACGTAAGTACCGCCTATAGAGTCTATAGGCCCACAAAAAATGCT |
| | | TTCTTCTTTTAATATACTTTTTTGTTTATCTTATTTCTAATACTTTCCCTAATCTCTTTCTT |
| | | TCAGGGCAATAATGATACAATGTATCATGCCTCTTTGCACCATTCTAAAGAATAACAGTGAT |
| | | AATTTCTGGGTTAAGGCAATAGCAATATTTCTGCATATAAATATTTCTGCATATAAATTGTA |
| | | ACTGATGTAAGAGGTTTCATATTGCTAATAGCAGCTACAATCCAGCTACCATTCTGCTTTTA |
| | | TTTTATGGTTGGGATAAGGCTGGATTATTCTGAGTCCAAGCTAGGCCCTTTTGCTAATCATG |
| | | TTCATACCTCTTATCTTCCTCCCACAGCTCCTGGGCAACGTGCTGGTCTGTGTGCTGGCCCA |
| | | TCACTTTGGCAAAGAATTGGGATTCGAACCGGTGTGCTGGGCGGGGGGCGGCGGGCCCTCCC |
| | | GCAGAACACCATGCGCTCTTCGGAAGACTGGAAGCGATGACAACCCTGTGACCTGGTTTGTC |
| | | ATCGCTTCCAGTCTTCTGAGGAGCGCCTTGACAGCAGCCATGGGAGGGCCGCCCCCTACCTC |
| | | AGTGACTCGAGGGGTGGCATCCCTGTGACCCCTCCCCAGTGCCTCTCCTGGCCCTGGAAGTT |
| | | GCCACTCCAGTGCCCACCAGCCTTGTCCTAATAAAATTAAGTTGCATCATTTTGTCTGACTA |
| | | GGTGTCCTTCTATAATATTATGGGGTGGAGGGGGGTGGTATGGAGCAAGGGGCAAGTTGGGA |
| | | AGACAACCTGTAGGGCCTGCGGGGTCTATTGGGAACCAAGCTGGAGTGCAGTGGCACAATCT |
| | | TGGCTCACTGCAATCTCCGCCTCCTGGGTTCAAGCGATTCTCCTGCCTCAGCCTCCCGAGTT |
| | | GTTGGGATTCCAGGCATGCATGACCAGGCTCAGCTAATTTTTGTTTTTTTGGTAGAGACGGG |
| | | GTTTCACCATATTGGCCAGGCTGGTCTCCAACTCCTAATCTCAGGTGATCTACCCACCTTGG |
| | | CCTCCCAAATTGCTGGGATTACAGGCGTGAACCACTGCTCCCTTCCCTGTCCTTATCGATGC |
| | | CTAGGGTTAATCATTAACTACAAGGAACCCCTAGTGATGGAGTTGGCCACTCCCTCTCTGCG |
| | | CGCTCGCTCGCTCACTGAGGCCGGGCGACCAAAGGTCGCCCGACGCCCGGGCTTTGCCCGGG |
| | | CGGCCTCAGTGAGCGAGCGAGCGCGCAG |
| VOYTAU57 | 5175 | CTGCGCGCTCGCTCGCTCACTGAGGCCGCCCGGGCAAAGCCCGGGCGTCGGGCGACCTTTGG |
| | | TCGCCCGGCCTCAGTGAGCGAGCGAGCGCGCAGAGAGGGAGTGTAGCCATGCTCTAGGAAGA |
| | | TCAATTCAATTCACGCGTCGACATTGATTATTGACTAGTTATTAATAGTAATCAATTACGGG |
| | | GTCATTAGTTCATAGCCCATATATGGAGTTCCGCGTTACATAACTTACGGTAAATGGCCCGC |
| | | CTGGCTGACCGCCCAACGACCCCCGCCCATTGACGTCAATAATGACGTATGTTCCCATAGTA |
| | | ACGCCAATAGGGACTTTCCATTGACGTCAATGGGTGGAGTATTTACGGTAAACTGCCCACTT |
| | | GGCAGTACATCAAGTGTATCATATGCCAAGTACGCCCCCTATTGACGTCAATGACGGTAAAT |
| | | GGCCCGCCTGGCATTATGCCCAGTACATGACCTTATGGGACTTTCCTACTTGGCAGTACATC |
| | | TACGTATTAGTCATCGCTATTACCATGTCGAGGCCACGTTCTGCTTCACTCTCCCCATCTCC |
| | | CCCCCCTCCCCACCCCCAATTTTGTATTTATTTATTTTTTAATTATTTTGTGCAGCGATGGG |
| | | GGCGGGGGGGGGGGGCGCGCGCCAGGCGGGGCGGGGCGGGGCGAGGGGCGGGGCGGGGCGAG |
| | | GCGGAGAGGTGCGGCGGCAGCCAATCAGAGCGGCGCGCTCCGAAAGTTTCCTTTTATGGCGA |
| | | GGCGGCGGCGGCGGCGGCCCTATAAAAAGCGAAGCGCGCGGCGGGGGGGAGCAAGCTTCGTT |
| | | TAGTGAACCGTCAGATCGCCTGGAGACGCCATCCACGCTGTTTTGACCTCCATAGAAGACAC |
| | | CGGGACCGATCCAGCCTCCGCGGATTCGAATCCCGGCCGGGAACGGTGCATTGGAACGCGGA |
| | | TTCCCCGTGCCAAGAGTGACGTAAGTACCGCCTATAGAGTCTATAGGCCCACAAAAAATGCT |
| | | TTCTTCTTTTAATATACTTTTTTGTTTATCTTATTTCTAATACTTTCCCTAATCTCTTTCTT |
| | | TCAGGGCAATAATGATACAATGTATCATGCCTCTTTGCACCATTCTAAAGAATAACAGTGAT |
| | | AATTTCTGGGTTAAGGCAATAGCAATATTTCTGCATATAAATATTTCTGCATATAAATTGTA |
| | | ACTGATGTAAGAGGTTTCATATTGCTAATAGCAGCTACAATCCAGCTACCATTCTGCTTTTA |
| | | TTTTATGGTTGGGATAAGGCTGGATTATTCTGAGTCCAAGCTAGGCCCTTTTGCTAATCATG |
| | | TTCATACCTCTTATCTTCCTCCCACAGCTCCTGGGCAACGTGCTGGTCTGTGTGCTGGCCCA |
| | | TCACTTTGGCAAAGAATTGGGATTCGAACCGGTGTGCTGGGCGGGGGGCGGCGGGCCCTCCC |
| | | GCAGAACACCATGCGCTCTTCGGAACTTCCGCGAGAACGCCAACCCTGTGACCTGGTTTGGC |
| | | GTTCTCGCGGAAGTTCTGAGGAGCGCCTTGACAGCAGCCATGGGAGGGCCGCCCCCTACCTC |
| | | AGTGACTCGAGGGGTGGCATCCCTGTGACCCCTCCCCAGTGCCTCTCCTGGCCCTGGAAGTT |
| | | GCCACTCCAGTGCCCACCAGCCTTGTCCTAATAAAATTAAGTTGCATCATTTTGTCTGACTA |
| | | GGTGTCCTTCTATAATATTATGGGGTGGAGGGGGGTGGTATGGAGCAAGGGGCAAGTTGGGA |
| | | AGACAACCTGTAGGGCCTGCGGGGTCTATTGGGAACCAAGCTGGAGTGCAGTGGCACAATCT |
| | | TGGCTCACTGCAATCTCCGCCTCCTGGGTTCAAGCGATTCTCCTGCCTCAGCCTCCCGAGTT |
| | | GTTGGGATTCCAGGCATGCATGACCAGGCTCAGCTAATTTTTGTTTTTTTGGTAGAGACGGG |
| | | GTTTCACCATATTGGCCAGGCTGGTCTCCAACTCCTAATCTCAGGTGATCTACCCACCTTGG |
| | | CCTCCCAAATTGCTGGGATTACAGGCGTGAACCACTGCTCCCTTCCCTGTCCTTATCGATGC |
| | | CTAGGGTTAATCATTAACTACAAGGAACCCCTAGTGATGGAGTTGGCCACTCCCTCTCTGCG |
| | | CGCTCGCTCGCTCACTGAGGCCGGGCGACCAAAGGTCGCCCGACGCCCGGGCTTTGCCCGGG |
| | | CGGCCTCAGTGAGCGAGCGAGCGCGCAG |
| VOYTAU58 | 5176 | CTGCGCGCTCGCTCGCTCACTGAGGCCGCCCGGGCAAAGCCCGGGCGTCGGGCGACCTTTGG |
| | | TCGCCCGGCCTCAGTGAGCGAGCGAGCGCGCAGAGAGGGAGTGTAGCCATGCTCTAGGAAGA |
| | | TCAATTCAATTCACGCGTCGACATTGATTATTGACTAGTTATTAATAGTAATCAATTACGGG |
| | | GTCATTAGTTCATAGCCCATATATGGAGTTCCGCGTTACATAACTTACGGTAAATGGCCCGC |
| | | CTGGCTGACCGCCCAACGACCCCCGCCCATTGACGTCAATAATGACGTATGTTCCCATAGTA |
| | | ACGCCAATAGGGACTTTCCATTGACGTCAATGGGTGGAGTATTTACGGTAAACTGCCCACTT |
| | | GGCAGTACATCAAGTGTATCATATGCCAAGTACGCCCCCTATTGACGTCAATGACGGTAAAT |
| | | GGCCCGCCTGGCATTATGCCCAGTACATGACCTTATGGGACTTTCCTACTTGGCAGTACATC |
| | | TACGTATTAGTCATCGCTATTACCATGTCGAGGCCACGTTCTGCTTCACTCTCCCCATCTCC |
| | | CCCCCCTCCCCACCCCCAATTTTGTATTTATTTATTTTTTAATTATTTTGTGCAGCGATGGG |
| | | GGCGGGGGGGGGGGGCGCGCGCCAGGCGGGGGGGGGGGGGGCGAGGGGCGGGGGGGGGCGAG |
| | | GCGGAGAGGTGCGGCGGCAGCCAATCAGAGCGGCGCGCTCCGAAAGTTTCCTTTTATGGCGA |
| | | GGCGGCGGCGGCGGCGGCCCTATAAAAAGCGAAGCGCGCGGCGGGCGGGAGCAAGCTTCGTT |
| | | TAGTGAACCGTCAGATCGCCTGGAGACGCCATCCACGCTGTTTTGACCTCCATAGAAGACAC |
| | | CGGGACCGATCCAGCCTCCGCGGATTCGAATCCCGGCCGGGAACGGTGCATTGGAACGCGGA |
| | | TTCCCCGTGCCAAGAGTGACGTAAGTACCGCCTATAGAGTCTATAGGCCCACAAAAAATGCT |
| | | TTCTTCTTTTAATATACTTTTTTGTTTATCTTATTTCTAATACTTTCCCTAATCTCTTTCTT |
| | | TCAGGGCAATAATGATACAATGTATCATGCCTCTTTGCACCATTCTAAAGAATAACAGTGAT |
| | | AATTTCTGGGTTAAGGCAATAGCAATATTTCTGCATATAAATATTTCTGCATATAAATTGTA |
| | | ACTGATGTAAGAGGTTTCATATTGCTAATAGCAGCTACAATCCAGCTACCATTCTGCTTTTA |
| | | TTTTATGGTTGGGATAAGGCTGGATTATTCTGAGTCCAAGCTAGGCCCTTTTGCTAATCATG |
| | | TTCATACCTCTTATCTTCCTCCCACAGCTCCTGGGCAACGTGCTGGTCTGTGTGCTGGCCCA |
| | | TCACTTTGGCAAAGAATTGGGATTCGAACCGGTGTGCTGGGCGGGGGGCGGCGGGCCCTCCC |
| | | GCAGAACACCATGCGCTCTTCGGAAGCTCCTCGCAGTTCGGTTCCCTGTGACCTGGTAACCG |
| | | AACTGCGAGGAGCTTCTGAGGAGCGCCTTGACAGCAGCCATGGGAGGGCCGCCCCCTACCTC |
| | | AGTGACTCGAGGGGTGGCATCCCTGTGACCCCTCCCCAGTGCCTCTCCTGGCCCTGGAAGTT |
| | | GCCACTCCAGTGCCCACCAGCCTTGTCCTAATAAAATTAAGTTGCATCATTTTGTCTGACTA |
| | | GGTGTCCTTCTATAATATTATGGGGTGGAGGGGGGTGGTATGGAGCAAGGGGCAAGTTGGGA |
| | | AGACAACCTGTAGGGCCTGCGGGGTCTATTGGGAACCAAGCTGGAGTGCAGTGGCACAATCT |
| | | TGGCTCACTGCAATCTCCGCCTCCTGGGTTCAAGCGATTCTCCTGCCTCAGCCTCCCGAGTT |
| | | GTTGGGATTCCAGGCATGCATGACCAGGCTCAGCTAATTTTTGTTTTTTTGGTAGAGACGGG |
| | | GTTTCACCATATTGGCCAGGCTGGTCTCCAACTCCTAATCTCAGGTGATCTACCCACCTTGG |
| | | CCTCCCAAATTGCTGGGATTACAGGCGTGAACCACTGCTCCCTTCCCTGTCCTTATCGATGC |
| | | CTAGGGTTAATCATTAACTACAAGGAACCCCTAGTGATGGAGTTGGCCACTCCCTCTCTGCG |
| | | CGCTCGCTCGCTCACTGAGGCCGGGCGACCAAAGGTCGCCCGACGCCCGGGCTTTGCCCGGG |
| | | CGGCCTCAGTGAGCGAGCGAGCGCGCAG |
| VOYTAU59 | 5177 | CTGCGCGCTCGCTCGCTCACTGAGGCCGCCCGGGCAAAGCCCGGGCGTCGGGCGACCTTTGG |
| | | TCGCCCGGCCTCAGTGAGCGAGCGAGCGCGCAGAGAGGGAGTGTAGCCATGCTCTAGGAAGA |
| | | TCAATTCAATTCACGCGTCGACATTGATTATTGACTAGTTATTAATAGTAATCAATTACGGG |
| | | GTCATTAGTTCATAGCCCATATATGGAGTTCCGCGTTACATAACTTACGGTAAATGGCCCGC |
| | | CTGGCTGACCGCCCAACGACCCCCGCCCATTGACGTCAATAATGACGTATGTTCCCATAGTA |
| | | ACGCCAATAGGGACTTTCCATTGACGTCAATGGGTGGAGTATTTACGGTAAACTGCCCACTT |
| | | GGCAGTACATCAAGTGTATCATATGCCAAGTACGCCCCCTATTGACGTCAATGACGGTAAAT |
| | | GGCCCGCCTGGCATTATGCCCAGTACATGACCTTATGGGACTTTCCTACTTGGCAGTACATC |
| | | TACGTATTAGTCATCGCTATTACCATGTCGAGGCCACGTTCTGCTTCACTCTCCCCATCTCC |
| | | CCCCCCTCCCCACCCCCAATTTTGTATTTATTTATTTTTTAATTATTTTGTGCAGCGATGGG |
| | | GGCGGGGGGGGGGGGCGCGCGCCAGGCGGGGCGGGGCGGGGCGAGGGGCGGGGCGGGGCGAG |
| | | GCGGAGAGGTGCGGCGGCAGCCAATCAGAGCGGCGCGCTCCGAAAGTTTCCTTTTATGGCGA |
| | | GGCGGCGGCGGCGGCGGCCCTATAAAAAGCGAAGCGCGCGGCGGGCGGGAGCAAGCTTCGTT |
| | | TAGTGAACCGTCAGATCGCCTGGAGACGCCATCCACGCTGTTTTGACCTCCATAGAAGACAC |
| | | CGGGACCGATCCAGCCTCCGCGGATTCGAATCCCGGCCGGGAACGGTGCATTGGAACGCGGA |
| | | TTCCCCGTGCCAAGAGTGACGTAAGTACCGCCTATAGAGTCTATAGGCCCACAAAAAATGCT |
| | | TTCTTCTTTTAATATACTTTTTTGTTTATCTTATTTCTAATACTTTCCCTAATCTCTTTCTT |
| | | TCAGGGCAATAATGATACAATGTATCATGCCTCTTTGCACCATTCTAAAGAATAACAGTGAT |
| | | AATTTCTGGGTTAAGGCAATAGCAATATTTCTGCATATAAATATTTCTGCATATAAATTGTA |
| | | ACTGATGTAAGAGGTTTCATATTGCTAATAGCAGCTACAATCCAGCTACCATTCTGCTTTTA |
| | | TTTTATGGTTGGGATAAGGCTGGATTATTCTGAGTCCAAGCTAGGCCCTTTTGCTAATCATG |
| | | TTCATACCTCTTATCTTCCTCCCACAGCTCCTGGGCAACGTGCTGGTCTGTGTGCTGGCCCA |
| | | TCACTTTGGCAAAGAATTGGGATTCGAACCGGTGTGCTGGGCGGGGGGGGGGGGGCCCTCCC |
| | | GCAGAACACCATGCGCTCTTCGGAAGGCTTTGGCTCGGGACTTCCCTGTGACCTGGTAAGTC |
| | | CCGAGCCAAAGCCTTCTGAGGAGCGCCTTGACAGCAGCCATGGGAGGGCCGCCCCCTACCTC |
| | | AGTGACTCGAGGGGTGGCATCCCTGTGACCCCTCCCCAGTGCCTCTCCTGGCCCTGGAAGTT |
| | | GCCACTCCAGTGCCCACCAGCCTTGTCCTAATAAAATTAAGTTGCATCATTTTGTCTGACTA |
| | | GGTGTCCTTCTATAATATTATGGGGTGGAGGGGGGTGGTATGGAGCAAGGGGCAAGTTGGGA |
| | | AGACAACCTGTAGGGCCTGCGGGGTCTATTGGGAACCAAGCTGGAGTGCAGTGGCACAATCT |
| | | TGGCTCACTGCAATCTCCGCCTCCTGGGTTCAAGCGATTCTCCTGCCTCAGCCTCCCGAGTT |
| | | GTTGGGATTCCAGGCATGCATGACCAGGCTCAGCTAATTTTTGTTTTTTTGGTAGAGACGGG |
| | | GTTTCACCATATTGGCCAGGCTGGTCTCCAACTCCTAATCTCAGGTGATCTACCCACCTTGG |
| | | CCTCCCAAATTGCTGGGATTACAGGCGTGAACCACTGCTCCCTTCCCTGTCCTTATCGATGC |
| | | CTAGGGTTAATCATTAACTACAAGGAACCCCTAGTGATGGAGTTGGCCACTCCCTCTCTGCG |
| | | CGCTCGCTCGCTCACTGAGGCCGGGCGACCAAAGGTCGCCCGACGCCCGGGCTTTGCCCGGG |
| | | CGGCCTCAGTGAGCGAGCGAGCGCGCAG |
| VOYTAU60 | 5178 | CTGCGCGCTCGCTCGCTCACTGAGGCCGCCCGGGCAAAGCCCGGGCGTCGGGCGACCTTTGG |
| | | TCGCCCGGCCTCAGTGAGCGAGCGAGCGCGCAGAGAGGGAGTGTAGCCATGCTCTAGGAAGA |
| | | TCAATTCAATTCACGCGTCGACATTGATTATTGACTAGTTATTAATAGTAATCAATTACGGG |
| | | GTCATTAGTTCATAGCCCATATATGGAGTTCCGCGTTACATAACTTACGGTAAATGGCCCGC |
| | | CTGGCTGACCGCCCAACGACCCCCGCCCATTGACGTCAATAATGACGTATGTTCCCATAGTA |
| | | ACGCCAATAGGGACTTTCCATTGACGTCAATGGGTGGAGTATTTACGGTAAACTGCCCACTT |
| | | GGCAGTACATCAAGTGTATCATATGCCAAGTACGCCCCCTATTGACGTCAATGACGGTAAAT |
| | | GGCCCGCCTGGCATTATGCCCAGTACATGACCTTATGGGACTTTCCTACTTGGCAGTACATC |
| | | TACGTATTAGTCATCGCTATTACCATGTCGAGGCCACGTTCTGCTTCACTCTCCCCATCTCC |
| | | CCCCCCTCCCCACCCCCAATTTTGTATTTATTTATTTTTTAATTATTTTGTGCAGCGATGGG |
| | | GGCGGGGGGGGGGGGCGCGCGCCAGGCGGGGCGGGGCGGGGCGAGGGGCGGGGGGGGGCGAG |
| | | GCGGAGAGGTGCGGCGGCAGCCAATCAGAGCGGCGCGCTCCGAAAGTTTCCTTTTATGGCGA |
| | | GGCGGCGGCGGCGGCGGCCCTATAAAAAGCGAAGCGCGCGGCGGGCGGGAGCAAGCTTCGTT |
| | | TAGTGAACCGTCAGATCGCCTGGAGACGCCATCCACGCTGTTTTGACCTCCATAGAAGACAC |
| | | CGGGACCGATCCAGCCTCCGCGGATTCGAATCCCGGCCGGGAACGGTGCATTGGAACGCGGA |
| | | TTCCCCGTGCCAAGAGTGACGTAAGTACCGCCTATAGAGTCTATAGGCCCACAAAAAATGCT |
| | | TTCTTCTTTTAATATACTTTTTTGTTTATCTTATTTCTAATACTTTCCCTAATCTCTTTCTT |
| | | TCAGGGCAATAATGATACAATGTATCATGCCTCTTTGCACCATTCTAAAGAATAACAGTGAT |
| | | AATTTCTGGGTTAAGGCAATAGCAATATTTCTGCATATAAATATTTCTGCATATAAATTGTA |
| | | ACTGATGTAAGAGGTTTCATATTGCTAATAGCAGCTACAATCCAGCTACCATTCTGCTTTTA |
| | | TTTTATGGTTGGGATAAGGCTGGATTATTCTGAGTCCAAGCTAGGCCCTTTTGCTAATCATG |
| | | TTCATACCTCTTATCTTCCTCCCACAGCTCCTGGGCAACGTGCTGGTCTGTGTGCTGGCCCA |
| | | TCACTTTGGCAAAGAATTGGGATTCGAACCGGTGTGCTGGGCGGGGGGGGGGGGGCCCTCCC |
| | | GCAGAACACCATGCGCTCTTCGGAAGACTGGAAGCGATGACAAACCTGTGACCTGGTTTGTC |
| | | ATCGCTTCCAGTCTTCTGAGGAGCGCCTTGACAGCAGCCATGGGAGGGCCGCCCCCTACCTC |
| | | AGTGACTCGAGGGGTGGCATCCCTGTGACCCCTCCCCAGTGCCTCTCCTGGCCCTGGAAGTT |
| | | GCCACTCCAGTGCCCACCAGCCTTGTCCTAATAAAATTAAGTTGCATCATTTTGTCTGACTA |
| | | GGTGTCCTTCTATAATATTATGGGGTGGAGGGGGGTGGTATGGAGCAAGGGGCAAGTTGGGA |
| | | AGACAACCTGTAGGGCCTGCGGGGTCTATTGGGAACCAAGCTGGAGTGCAGTGGCACAATCT |
| | | TGGCTCACTGCAATCTCCGCCTCCTGGGTTCAAGCGATTCTCCTGCCTCAGCCTCCCGAGTT |
| | | GTTGGGATTCCAGGCATGCATGACCAGGCTCAGCTAATTTTTGTTTTTTTGGTAGAGACGGG |
| | | GTTTCACCATATTGGCCAGGCTGGTCTCCAACTCCTAATCTCAGGTGATCTACCCACCTTGG |
| | | CCTCCCAAATTGCTGGGATTACAGGCGTGAACCACTGCTCCCTTCCCTGTCCTTATCGATGC |
| | | CTAGGGTTAATCATTAACTACAAGGAACCCCTAGTGATGGAGTTGGCCACTCCCTCTCTGCG |
| | | CGCTCGCTCGCTCACTGAGGCCGGGCGACCAAAGGTCGCCCGACGCCCGGGCTTTGCCCGGG |
| | | CGGCCTCAGTGAGCGAGCGAGCGCGCAG |
| VOYTAU61 | 5179 | CTGCGCGCTCGCTCGCTCACTGAGGCCGCCCGGGCAAAGCCCGGGCGTCGGGCGACCTTTGG |
| | | TCGCCCGGCCTCAGTGAGCGAGCGAGCGCGCAGAGAGGGAGTGTAGCCATGCTCTAGGAAGA |
| | | TCAATTCAATTCACGCGTCGACATTGATTATTGACTAGTTATTAATAGTAATCAATTACGGG |
| | | GTCATTAGTTCATAGCCCATATATGGAGTTCCGCGTTACATAACTTACGGTAAATGGCCCGC |
| | | CTGGCTGACCGCCCAACGACCCCCGCCCATTGACGTCAATAATGACGTATGTTCCCATAGTA |
| | | ACGCCAATAGGGACTTTCCATTGACGTCAATGGGTGGAGTATTTACGGTAAACTGCCCACTT |
| | | GGCAGTACATCAAGTGTATCATATGCCAAGTACGCCCCCTATTGACGTCAATGACGGTAAAT |
| | | GGCCCGCCTGGCATTATGCCCAGTACATGACCTTATGGGACTTTCCTACTTGGCAGTACATC |
| | | TACGTATTAGTCATCGCTATTACCATGTCGAGGCCACGTTCTGCTTCACTCTCCCCATCTCC |
| | | CCCCCCTCCCCACCCCCAATTTTGTATTTATTTATTTTTTAATTATTTTGTGCAGCGATGGG |
| | | GGCGGGGGGGGGGGGCGCGCGCCAGGCGGGGCGGGGCGGGGCGAGGGGCGGGGCGGGGCGAG |
| | | GCGGAGAGGTGCGGCGGCAGCCAATCAGAGCGGCGCGCTCCGAAAGTTTCCTTTTATGGCGA |
| | | GGCGGCGGCGGCGGCGGCCCTATAAAAAGCGAAGCGCGCGGCGGGCGGGAGCAAGCTTCGTT |
| | | TAGTGAACCGTCAGATCGCCTGGAGACGCCATCCACGCTGTTTTGACCTCCATAGAAGACAC |
| | | CGGGACCGATCCAGCCTCCGCGGATTCGAATCCCGGCCGGGAACGGTGCATTGGAACGCGGA |
| | | TTCCCCGTGCCAAGAGTGACGTAAGTACCGCCTATAGAGTCTATAGGCCCACAAAAAATGCT |
| | | TTCTTCTTTTAATATACTTTTTTGTTTATCTTATTTCTAATACTTTCCCTAATCTCTTTCTT |
| | | TCAGGGCAATAATGATACAATGTATCATGCCTCTTTGCACCATTCTAAAGAATAACAGTGAT |
| | | AATTTCTGGGTTAAGGCAATAGCAATATTTCTGCATATAAATATTTCTGCATATAAATTGTA |
| | | ACTGATGTAAGAGGTTTCATATTGCTAATAGCAGCTACAATCCAGCTACCATTCTGCTTTTA |
| | | TTTTATGGTTGGGATAAGGCTGGATTATTCTGAGTCCAAGCTAGGCCCTTTTGCTAATCATG |
| | | TTCATACCTCTTATCTTCCTCCCACAGCTCCTGGGCAACGTGCTGGTCTGTGTGCTGGCCCA |
| | | TCACTTTGGCAAAGAATTGGGATTCGAACCGGTGTGCTGGGCGGGGGGCGGCGGGCCCTCCC |
| | | GCAGAACACCATGCGCTCTTCGGAACTTCCGCGAGAACGCCAAACCTGTGACCTGGTTTGGC |
| | | GTTCTCGCGGAAGTTCTGAGGAGCGCCTTGACAGCAGCCATGGGAGGGCCGCCCCCTACCTC |
| | | AGTGACTCGAGGGGTGGCATCCCTGTGACCCCTCCCCAGTGCCTCTCCTGGCCCTGGAAGTT |
| | | GCCACTCCAGTGCCCACCAGCCTTGTCCTAATAAAATTAAGTTGCATCATTTTGTCTGACTA |
| | | GGTGTCCTTCTATAATATTATGGGGTGGAGGGGGGTGGTATGGAGCAAGGGGCAAGTTGGGA |
| | | AGACAACCTGTAGGGCCTGCGGGGTCTATTGGGAACCAAGCTGGAGTGCAGTGGCACAATCT |
| | | TGGCTCACTGCAATCTCCGCCTCCTGGGTTCAAGCGATTCTCCTGCCTCAGCCTCCCGAGTT |
| | | GTTGGGATTCCAGGCATGCATGACCAGGCTCAGCTAATTTTTGTTTTTTTGGTAGAGACGGG |
| | | GTTTCACCATATTGGCCAGGCTGGTCTCCAACTCCTAATCTCAGGTGATCTACCCACCTTGG |
| | | CCTCCCAAATTGCTGGGATTACAGGCGTGAACCACTGCTCCCTTCCCTGTCCTTATCGATGC |
| | | CTAGGGTTAATCATTAACTACAAGGAACCCCTAGTGATGGAGTTGGCCACTCCCTCTCTGCG |
| | | CGCTCGCTCGCTCACTGAGGCCGGGCGACCAAAGGTCGCCCGACGCCCGGGCTTTGCCCGGG |
| | | CGGCCTCAGTGAGCGAGCGAGCGCGCAG |
| VOYTAU62 | 5180 | CTGCGCGCTCGCTCGCTCACTGAGGCCGCCCGGGCAAAGCCCGGGCGTCGGGCGACCTTTGG |
| | | TCGCCCGGCCTCAGTGAGCGAGCGAGCGCGCAGAGAGGGAGTGTAGCCATGCTCTAGGAAGA |
| | | TCAATTCAATTCACGCGTCGACATTGATTATTGACTAGTTATTAATAGTAATCAATTACGGG |
| | | GTCATTAGTTCATAGCCCATATATGGAGTTCCGCGTTACATAACTTACGGTAAATGGCCCGC |
| | | CTGGCTGACCGCCCAACGACCCCCGCCCATTGACGTCAATAATGACGTATGTTCCCATAGTA |
| | | ACGCCAATAGGGACTTTCCATTGACGTCAATGGGTGGAGTATTTACGGTAAACTGCCCACTT |
| | | GGCAGTACATCAAGTGTATCATATGCCAAGTACGCCCCCTATTGACGTCAATGACGGTAAAT |
| | | GGCCCGCCTGGCATTATGCCCAGTACATGACCTTATGGGACTTTCCTACTTGGCAGTACATC |
| | | TACGTATTAGTCATCGCTATTACCATGTCGAGGCCACGTTCTGCTTCACTCTCCCCATCTCC |
| | | CCCCCCTCCCCACCCCCAATTTTGTATTTATTTATTTTTTAATTATTTTGTGCAGCGATGGG |
| | | GGCGGGGGGGGGGGGCGCGCGCCAGGCGGGGCGGGGCGGGGCGAGGGGCGGGGCGGGGCGAG |
| | | GCGGAGAGGTGCGGCGGCAGCCAATCAGAGCGGCGCGCTCCGAAAGTTTCCTTTTATGGCGA |
| | | GGCGGCGGCGGCGGCGGCCCTATAAAAAGCGAAGCGCGCGGCGGGCGGGAGCAAGCTTCGTT |
| | | TAGTGAACCGTCAGATCGCCTGGAGACGCCATCCACGCTGTTTTGACCTCCATAGAAGACAC |
| | | CGGGACCGATCCAGCCTCCGCGGATTCGAATCCCGGCCGGGAACGGTGCATTGGAACGCGGA |
| | | TTCCCCGTGCCAAGAGTGACGTAAGTACCGCCTATAGAGTCTATAGGCCCACAAAAAATGCT |
| | | TTCTTCTTTTAATATACTTTTTTGTTTATCTTATTTCTAATACTTTCCCTAATCTCTTTCTT |
| | | TCAGGGCAATAATGATACAATGTATCATGCCTCTTTGCACCATTCTAAAGAATAACAGTGAT |
| | | AATTTCTGGGTTAAGGCAATAGCAATATTTCTGCATATAAATATTTCTGCATATAAATTGTA |
| | | ACTGATGTAAGAGGTTTCATATTGCTAATAGCAGCTACAATCCAGCTACCATTCTGCTTTTA |
| | | TTTTATGGTTGGGATAAGGCTGGATTATTCTGAGTCCAAGCTAGGCCCTTTTGCTAATCATG |
| | | TTCATACCTCTTATCTTCCTCCCACAGCTCCTGGGCAACGTGCTGGTCTGTGTGCTGGCCCA |
| | | TCACTTTGGCAAAGAATTGGGATTCGAACCGGTGTGCTGGGCGGGGGGCGGCGGGCCCTCCC |
| | | GCAGAACACCATGCGCTCTTCGGAAGCTCCTCGCAGTTCGGTTGCCTGTGACCTGGTAACCG |
| | | AACTGCGAGGAGCTTCTGAGGAGCGCCTTGACAGCAGCCATGGGAGGGCCGCCCCCTACCTC |
| | | AGTGACTCGAGGGGTGGCATCCCTGTGACCCCTCCCCAGTGCCTCTCCTGGCCCTGGAAGTT |
| | | GCCACTCCAGTGCCCACCAGCCTTGTCCTAATAAAATTAAGTTGCATCATTTTGTCTGACTA |
| | | GGTGTCCTTCTATAATATTATGGGGTGGAGGGGGGTGGTATGGAGCAAGGGGCAAGTTGGGA |
| | | AGACAACCTGTAGGGCCTGCGGGGTCTATTGGGAACCAAGCTGGAGTGCAGTGGCACAATCT |
| | | TGGCTCACTGCAATCTCCGCCTCCTGGGTTCAAGCGATTCTCCTGCCTCAGCCTCCCGAGTT |
| | | GTTGGGATTCCAGGCATGCATGACCAGGCTCAGCTAATTTTTGTTTTTTTGGTAGAGACGGG |
| | | GTTTCACCATATTGGCCAGGCTGGTCTCCAACTCCTAATCTCAGGTGATCTACCCACCTTGG |
| | | CCTCCCAAATTGCTGGGATTACAGGCGTGAACCACTGCTCCCTTCCCTGTCCTTATCGATGC |
| | | CTAGGGTTAATCATTAACTACAAGGAACCCCTAGTGATGGAGTTGGCCACTCCCTCTCTGCG |
| | | CGCTCGCTCGCTCACTGAGGCCGGGCGACCAAAGGTCGCCCGACGCCCGGGCTTTGCCCGGG |
| | | CGGCCTCAGTGAGCGAGCGAGCGCGCAG |
| VOYTAU63 | 5181 | CTGCGCGCTCGCTCGCTCACTGAGGCCGCCCGGGCAAAGCCCGGGCGTCGGGCGACCTTTGG |
| | | TCGCCCGGCCTCAGTGAGCGAGCGAGCGCGCAGAGAGGGAGTGTAGCCATGCTCTAGGAAGA |
| | | TCAATTCAATTCACGCGTCGACATTGATTATTGACTAGTTATTAATAGTAATCAATTACGGG |
| | | GTCATTAGTTCATAGCCCATATATGGAGTTCCGCGTTACATAACTTACGGTAAATGGCCCGC |
| | | CTGGCTGACCGCCCAACGACCCCCGCCCATTGACGTCAATAATGACGTATGTTCCCATAGTA |
| | | ACGCCAATAGGGACTTTCCATTGACGTCAATGGGTGGAGTATTTACGGTAAACTGCCCACTT |
| | | GGCAGTACATCAAGTGTATCATATGCCAAGTACGCCCCCTATTGACGTCAATGACGGTAAAT |
| | | GGCCCGCCTGGCATTATGCCCAGTACATGACCTTATGGGACTTTCCTACTTGGCAGTACATC |
| | | TACGTATTAGTCATCGCTATTACCATGTCGAGGCCACGTTCTGCTTCACTCTCCCCATCTCC |
| | | CCCCCCTCCCCACCCCCAATTTTGTATTTATTTATTTTTTAATTATTTTGTGCAGCGATGGG |
| | | GGCGGGGGGGGGGGGCGCGCGCCAGGCGGGGCGGGGCGGGGCGAGGGGCGGGGCGGGGCGAG |
| | | GCGGAGAGGTGCGGCGGCAGCCAATCAGAGCGGCGCGCTCCGAAAGTTTCCTTTTATGGCGA |
| | | GGCGGCGGCGGCGGCGGCCCTATAAAAAGCGAAGCGCGCGGCGGGCGGGAGCAAGCTTCGTT |
| | | TAGTGAACCGTCAGATCGCCTGGAGACGCCATCCACGCTGTTTTGACCTCCATAGAAGACAC |
| | | CGGGACCGATCCAGCCTCCGCGGATTCGAATCCCGGCCGGGAACGGTGCATTGGAACGCGGA |
| | | TTCCCCGTGCCAAGAGTGACGTAAGTACCGCCTATAGAGTCTATAGGCCCACAAAAAATGCT |
| | | TTCTTCTTTTAATATACTTTTTTGTTTATCTTATTTCTAATACTTTCCCTAATCTCTTTCTT |
| | | TCAGGGCAATAATGATACAATGTATCATGCCTCTTTGCACCATTCTAAAGAATAACAGTGAT |
| | | AATTTCTGGGTTAAGGCAATAGCAATATTTCTGCATATAAATATTTCTGCATATAAATTGTA |
| | | ACTGATGTAAGAGGTTTCATATTGCTAATAGCAGCTACAATCCAGCTACCATTCTGCTTTTA |
| | | TTTTATGGTTGGGATAAGGCTGGATTATTCTGAGTCCAAGCTAGGCCCTTTTGCTAATCATG |
| | | TTCATACCTCTTATCTTCCTCCCACAGCTCCTGGGCAACGTGCTGGTCTGTGTGCTGGCCCA |
| | | TCACTTTGGCAAAGAATTGGGATTCGAACCGGTGTGCTGGGCGGGGGGCGGCGGGCCCTCCC |
| | | GCAGAACACCATGCGCTCTTCGGAAGGCTTTGGCTCGGGACTTACCTGTGACCTGGTAAGTC |
| | | CCGAGCCAAAGCCTTCTGAGGAGCGCCTTGACAGCAGCCATGGGAGGGCCGCCCCCTACCTC |
| | | AGTGACTCGAGGGGTGGCATCCCTGTGACCCCTCCCCAGTGCCTCTCCTGGCCCTGGAAGTT |
| | | GCCACTCCAGTGCCCACCAGCCTTGTCCTAATAAAATTAAGTTGCATCATTTTGTCTGACTA |
| | | GGTGTCCTTCTATAATATTATGGGGTGGAGGGGGGTGGTATGGAGCAAGGGGCAAGTTGGGA |
| | | AGACAACCTGTAGGGCCTGCGGGGTCTATTGGGAACCAAGCTGGAGTGCAGTGGCACAATCT |
| | | TGGCTCACTGCAATCTCCGCCTCCTGGGTTCAAGCGATTCTCCTGCCTCAGCCTCCCGAGTT |
| | | GTTGGGATTCCAGGCATGCATGACCAGGCTCAGCTAATTTTTGTTTTTTTGGTAGAGACGGG |
| | | GTTTCACCATATTGGCCAGGCTGGTCTCCAACTCCTAATCTCAGGTGATCTACCCACCTTGG |
| | | CCTCCCAAATTGCTGGGATTACAGGCGTGAACCACTGCTCCCTTCCCTGTCCTTATCGATGC |
| | | CTAGGGTTAATCATTAACTACAAGGAACCCCTAGTGATGGAGTTGGCCACTCCCTCTCTGCG |
| | | CGCTCGCTCGCTCACTGAGGCCGGGCGACCAAAGGTCGCCCGACGCCCGGGCTTTGCCCGGG |
| | | CGGCCTCAGTGAGCGAGCGAGCGCGCAG |
| VOYTAU64 | 5182 | CTGCGCGCTCGCTCGCTCACTGAGGCCGCCCGGGCAAAGCCCGGGCGTCGGGCGACCTTTGG |
| | | TCGCCCGGCCTCAGTGAGCGAGCGAGCGCGCAGAGAGGGAGTGTAGCCATGCTCTAGGAAGA |
| | | TCAATTCAATTCACGCGTCGACATTGATTATTGACTAGTTATTAATAGTAATCAATTACGGG |
| | | GTCATTAGTTCATAGCCCATATATGGAGTTCCGCGTTACATAACTTACGGTAAATGGCCCGC |
| | | CTGGCTGACCGCCCAACGACCCCCGCCCATTGACGTCAATAATGACGTATGTTCCCATAGTA |
| | | ACGCCAATAGGGACTTTCCATTGACGTCAATGGGTGGAGTATTTACGGTAAACTGCCCACTT |
| | | GGCAGTACATCAAGTGTATCATATGCCAAGTACGCCCCCTATTGACGTCAATGACGGTAAAT |
| | | GGCCCGCCTGGCATTATGCCCAGTACATGACCTTATGGGACTTTCCTACTTGGCAGTACATC |
| | | TACGTATTAGTCATCGCTATTACCATGTCGAGGCCACGTTCTGCTTCACTCTCCCCATCTCC |
| | | CCCCCCTCCCCACCCCCAATTTTGTATTTATTTATTTTTTAATTATTTTGTGCAGCGATGGG |
| | | GGCGGGGGGGGGGGGCGCGCGCCAGGCGGGGCGGGGCGGGGCGAGGGGCGGGGCGGGGCGAG |
| | | GCGGAGAGGTGCGGCGGCAGCCAATCAGAGCGGCGCGCTCCGAAAGTTTCCTTTTATGGCGA |
| | | GGCGGCGGCGGCGGCGGCCCTATAAAAAGCGAAGCGCGCGGCGGGCGGGAGCAAGCTTCGTT |
| | | TAGTGAACCGTCAGATCGCCTGGAGACGCCATCCACGCTGTTTTGACCTCCATAGAAGACAC |
| | | CGGGACCGATCCAGCCTCCGCGGATTCGAATCCCGGCCGGGAACGGTGCATTGGAACGCGGA |
| | | TTCCCCGTGCCAAGAGTGACGTAAGTACCGCCTATAGAGTCTATAGGCCCACAAAAAATGCT |
| | | TTCTTCTTTTAATATACTTTTTTGTTTATCTTATTTCTAATACTTTCCCTAATCTCTTTCTT |
| | | TCAGGGCAATAATGATACAATGTATCATGCCTCTTTGCACCATTCTAAAGAATAACAGTGAT |
| | | AATTTCTGGGTTAAGGCAATAGCAATATTTCTGCATATAAATATTTCTGCATATAAATTGTA |
| | | ACTGATGTAAGAGGTTTCATATTGCTAATAGCAGCTACAATCCAGCTACCATTCTGCTTTTA |
| | | TTTTATGGTTGGGATAAGGCTGGATTATTCTGAGTCCAAGCTAGGCCCTTTTGCTAATCATG |
| | | TTCATACCTCTTATCTTCCTCCCACAGCTCCTGGGCAACGTGCTGGTCTGTGTGCTGGCCCA |
| | | TCACTTTGGCAAAGAATTGGGATTCGAACCGGTGTGCTGGGCGGGGGGGGGGGGGCCCTCCC |
| | | GCAGAACACCATGCGCTCTTCGGAAGACTGGAAGCGATGACAATCCTGTGATTTGGTTTGTC |
| | | ATCGCTTCCAGTCTTCTGAGGAGCGCCTTGACAGCAGCCATGGGAGGGCCGCCCCCTACCTC |
| | | AGTGACTCGAGGGGTGGCATCCCTGTGACCCCTCCCCAGTGCCTCTCCTGGCCCTGGAAGTT |
| | | GCCACTCCAGTGCCCACCAGCCTTGTCCTAATAAAATTAAGTTGCATCATTTTGTCTGACTA |
| | | GGTGTCCTTCTATAATATTATGGGGTGGAGGGGGGTGGTATGGAGCAAGGGGCAAGTTGGGA |
| | | AGACAACCTGTAGGGCCTGCGGGGTCTATTGGGAACCAAGCTGGAGTGCAGTGGCACAATCT |
| | | TGGCTCACTGCAATCTCCGCCTCCTGGGTTCAAGCGATTCTCCTGCCTCAGCCTCCCGAGTT |
| | | GTTGGGATTCCAGGCATGCATGACCAGGCTCAGCTAATTTTTGTTTTTTTGGTAGAGACGGG |
| | | GTTTCACCATATTGGCCAGGCTGGTCTCCAACTCCTAATCTCAGGTGATCTACCCACCTTGG |
| | | CCTCCCAAATTGCTGGGATTACAGGCGTGAACCACTGCTCCCTTCCCTGTCCTTATCGATGC |
| | | CTAGGGTTAATCATTAACTACAAGGAACCCCTAGTGATGGAGTTGGCCACTCCCTCTCTGCG |
| | | CGCTCGCTCGCTCACTGAGGCCGGGCGACCAAAGGTCGCCCGACGCCCGGGCTTTGCCCGGG |
| | | CGGCCTCAGTGAGCGAGCGAGCGCGCAG |
| VOYTAU65 | 5183 | CTGCGCGCTCGCTCGCTCACTGAGGCCGCCCGGGCAAAGCCCGGGCGTCGGGCGACCTTTGG |
| | | TCGCCCGGCCTCAGTGAGCGAGCGAGCGCGCAGAGAGGGAGTGTAGCCATGCTCTAGGAAGA |
| | | TCAATTCAATTCACGCGTCGACATTGATTATTGACTAGTTATTAATAGTAATCAATTACGGG |
| | | GTCATTAGTTCATAGCCCATATATGGAGTTCCGCGTTACATAACTTACGGTAAATGGCCCGC |
| | | CTGGCTGACCGCCCAACGACCCCCGCCCATTGACGTCAATAATGACGTATGTTCCCATAGTA |
| | | ACGCCAATAGGGACTTTCCATTGACGTCAATGGGTGGAGTATTTACGGTAAACTGCCCACTT |
| | | GGCAGTACATCAAGTGTATCATATGCCAAGTACGCCCCCTATTGACGTCAATGACGGTAAAT |
| | | GGCCCGCCTGGCATTATGCCCAGTACATGACCTTATGGGACTTTCCTACTTGGCAGTACATC |
| | | TACGTATTAGTCATCGCTATTACCATGTCGAGGCCACGTTCTGCTTCACTCTCCCCATCTCC |
| | | CCCCCCTCCCCACCCCCAATTTTGTATTTATTTATTTTTTAATTATTTTGTGCAGCGATGGG |
| | | GGCGGGGGGGGGGGGCGCGCGCCAGGCGGGGCGGGGCGGGGCGAGGGGCGGGGCGGGGCGAG |
| | | GCGGAGAGGTGCGGCGGCAGCCAATCAGAGCGGCGCGCTCCGAAAGTTTCCTTTTATGGCGA |
| | | GGCGGCGGCGGCGGCGGCCCTATAAAAAGCGAAGCGCGCGGCGGGCGGGAGCAAGCTTCGTT |
| | | TAGTGAACCGTCAGATCGCCTGGAGACGCCATCCACGCTGTTTTGACCTCCATAGAAGACAC |
| | | CGGGACCGATCCAGCCTCCGCGGATTCGAATCCCGGCCGGGAACGGTGCATTGGAACGCGGA |
| | | TTCCCCGTGCCAAGAGTGACGTAAGTACCGCCTATAGAGTCTATAGGCCCACAAAAAATGCT |
| | | TTCTTCTTTTAATATACTTTTTTGTTTATCTTATTTCTAATACTTTCCCTAATCTCTTTCTT |
| | | TCAGGGCAATAATGATACAATGTATCATGCCTCTTTGCACCATTCTAAAGAATAACAGTGAT |
| | | AATTTCTGGGTTAAGGCAATAGCAATATTTCTGCATATAAATATTTCTGCATATAAATTGTA |
| | | ACTGATGTAAGAGGTTTCATATTGCTAATAGCAGCTACAATCCAGCTACCATTCTGCTTTTA |
| | | TTTTATGGTTGGGATAAGGCTGGATTATTCTGAGTCCAAGCTAGGCCCTTTTGCTAATCATG |
| | | TTCATACCTCTTATCTTCCTCCCACAGCTCCTGGGCAACGTGCTGGTCTGTGTGCTGGCCCA |
| | | TCACTTTGGCAAAGAATTGGGATTCGAACCGGTGTGCTGGGCGGGGGGGGGGGGGCCCTCCC |
| | | GCAGAACACCATGCGCTCTTCGGAACTTCCGCGAGAACGCCAATCCTGTGATTTGGTTTGGC |
| | | GTTCTCGCGGAAGTTCTGAGGAGCGCCTTGACAGCAGCCATGGGAGGGCCGCCCCCTACCTC |
| | | AGTGACTCGAGGGGTGGCATCCCTGTGACCCCTCCCCAGTGCCTCTCCTGGCCCTGGAAGTT |
| | | GCCACTCCAGTGCCCACCAGCCTTGTCCTAATAAAATTAAGTTGCATCATTTTGTCTGACTA |
| | | GGTGTCCTTCTATAATATTATGGGGTGGAGGGGGGTGGTATGGAGCAAGGGGCAAGTTGGGA |
| | | AGACAACCTGTAGGGCCTGCGGGGTCTATTGGGAACCAAGCTGGAGTGCAGTGGCACAATCT |
| | | TGGCTCACTGCAATCTCCGCCTCCTGGGTTCAAGCGATTCTCCTGCCTCAGCCTCCCGAGTT |
| | | GTTGGGATTCCAGGCATGCATGACCAGGCTCAGCTAATTTTTGTTTTTTTGGTAGAGACGGG |
| | | GTTTCACCATATTGGCCAGGCTGGTCTCCAACTCCTAATCTCAGGTGATCTACCCACCTTGG |
| | | CCTCCCAAATTGCTGGGATTACAGGCGTGAACCACTGCTCCCTTCCCTGTCCTTATCGATGC |
| | | CTAGGGTTAATCATTAACTACAAGGAACCCCTAGTGATGGAGTTGGCCACTCCCTCTCTGCG |
| | | CGCTCGCTCGCTCACTGAGGCCGGGCGACCAAAGGTCGCCCGACGCCCGGGCTTTGCCCGGG |
| | | CGGCCTCAGTGAGCGAGCGAGCGCGCAG |
| VOYTAU66 | 5184 | CTGCGCGCTCGCTCGCTCACTGAGGCCGCCCGGGCAAAGCCCGGGCGTCGGGCGACCTTTGG |
| | | TCGCCCGGCCTCAGTGAGCGAGCGAGCGCGCAGAGAGGGAGTGTAGCCATGCTCTAGGAAGA |
| | | TCAATTCAATTCACGCGTCGACATTGATTATTGACTAGTTATTAATAGTAATCAATTACGGG |
| | | GTCATTAGTTCATAGCCCATATATGGAGTTCCGCGTTACATAACTTACGGTAAATGGCCCGC |
| | | CTGGCTGACCGCCCAACGACCCCCGCCCATTGACGTCAATAATGACGTATGTTCCCATAGTA |
| | | ACGCCAATAGGGACTTTCCATTGACGTCAATGGGTGGAGTATTTACGGTAAACTGCCCACTT |
| | | GGCAGTACATCAAGTGTATCATATGCCAAGTACGCCCCCTATTGACGTCAATGACGGTAAAT |
| | | GGCCCGCCTGGCATTATGCCCAGTACATGACCTTATGGGACTTTCCTACTTGGCAGTACATC |
| | | TACGTATTAGTCATCGCTATTACCATGTCGAGGCCACGTTCTGCTTCACTCTCCCCATCTCC |
| | | CCCCCCTCCCCACCCCCAATTTTGTATTTATTTATTTTTTAATTATTTTGTGCAGCGATGGG |
| | | GGCGGGGGGGGGGGGCGCGCGCCAGGCGGGGCGGGGCGGGGCGAGGGGCGGGGCGGGGCGAG |
| | | GCGGAGAGGTGCGGCGGCAGCCAATCAGAGCGGCGCGCTCCGAAAGTTTCCTTTTATGGCGA |
| | | GGCGGCGGCGGCGGCGGCCCTATAAAAAGCGAAGCGCGCGGCGGGCGGGAGCAAGCTTCGTT |
| | | TAGTGAACCGTCAGATCGCCTGGAGACGCCATCCACGCTGTTTTGACCTCCATAGAAGACAC |
| | | CGGGACCGATCCAGCCTCCGCGGATTCGAATCCCGGCCGGGAACGGTGCATTGGAACGCGGA |
| | | TTCCCCGTGCCAAGAGTGACGTAAGTACCGCCTATAGAGTCTATAGGCCCACAAAAAATGCT |
| | | TTCTTCTTTTAATATACTTTTTTGTTTATCTTATTTCTAATACTTTCCCTAATCTCTTTCTT |
| | | TCAGGGCAATAATGATACAATGTATCATGCCTCTTTGCACCATTCTAAAGAATAACAGTGAT |
| | | AATTTCTGGGTTAAGGCAATAGCAATATTTCTGCATATAAATATTTCTGCATATAAATTGTA |
| | | ACTGATGTAAGAGGTTTCATATTGCTAATAGCAGCTACAATCCAGCTACCATTCTGCTTTTA |
| | | TTTTATGGTTGGGATAAGGCTGGATTATTCTGAGTCCAAGCTAGGCCCTTTTGCTAATCATG |
| | | TTCATACCTCTTATCTTCCTCCCACAGCTCCTGGGCAACGTGCTGGTCTGTGTGCTGGCCCA |
| | | TCACTTTGGCAAAGAATTGGGATTCGAACCGGTGTGCTGGGCGGGGGGCGGCGGGCCCTCCC |
| | | GCAGAACACCATGCGCTCTTCGGAAGCTCCTCGCAGTTCGGTTTCCTGTGATTTGGTAACCG |
| | | AACTGCGAGGAGCTTCTGAGGAGCGCCTTGACAGCAGCCATGGGAGGGCCGCCCCCTACCTC |
| | | AGTGACTCGAGGGGTGGCATCCCTGTGACCCCTCCCCAGTGCCTCTCCTGGCCCTGGAAGTT |
| | | GCCACTCCAGTGCCCACCAGCCTTGTCCTAATAAAATTAAGTTGCATCATTTTGTCTGACTA |
| | | GGTGTCCTTCTATAATATTATGGGGTGGAGGGGGGTGGTATGGAGCAAGGGGCAAGTTGGGA |
| | | AGACAACCTGTAGGGCCTGCGGGGTCTATTGGGAACCAAGCTGGAGTGCAGTGGCACAATCT |
| | | TGGCTCACTGCAATCTCCGCCTCCTGGGTTCAAGCGATTCTCCTGCCTCAGCCTCCCGAGTT |
| | | GTTGGGATTCCAGGCATGCATGACCAGGCTCAGCTAATTTTTGTTTTTTTGGTAGAGACGGG |
| | | GTTTCACCATATTGGCCAGGCTGGTCTCCAACTCCTAATCTCAGGTGATCTACCCACCTTGG |
| | | CCTCCCAAATTGCTGGGATTACAGGCGTGAACCACTGCTCCCTTCCCTGTCCTTATCGATGC |
| | | CTAGGGTTAATCATTAACTACAAGGAACCCCTAGTGATGGAGTTGGCCACTCCCTCTCTGCG |
| | | CGCTCGCTCGCTCACTGAGGCCGGGCGACCAAAGGTCGCCCGACGCCCGGGCTTTGCCCGGG |
| | | CGGCCTCAGTGAGCGAGCGAGCGCGCAG |
| VOYTAU67 | 5185 | CTGCGCGCTCGCTCGCTCACTGAGGCCGCCCGGGCAAAGCCCGGGCGTCGGGCGACCTTTGG |
| | | TCGCCCGGCCTCAGTGAGCGAGCGAGCGCGCAGAGAGGGAGTGTAGCCATGCTCTAGGAAGA |
| | | TCAATTCAATTCACGCGTCGACATTGATTATTGACTAGTTATTAATAGTAATCAATTACGGG |
| | | GTCATTAGTTCATAGCCCATATATGGAGTTCCGCGTTACATAACTTACGGTAAATGGCCCGC |
| | | CTGGCTGACCGCCCAACGACCCCCGCCCATTGACGTCAATAATGACGTATGTTCCCATAGTA |
| | | ACGCCAATAGGGACTTTCCATTGACGTCAATGGGTGGAGTATTTACGGTAAACTGCCCACTT |
| | | GGCAGTACATCAAGTGTATCATATGCCAAGTACGCCCCCTATTGACGTCAATGACGGTAAAT |
| | | GGCCCGCCTGGCATTATGCCCAGTACATGACCTTATGGGACTTTCCTACTTGGCAGTACATC |
| | | TACGTATTAGTCATCGCTATTACCATGTCGAGGCCACGTTCTGCTTCACTCTCCCCATCTCC |
| | | CCCCCCTCCCCACCCCCAATTTTGTATTTATTTATTTTTTAATTATTTTGTGCAGCGATGGG |
| | | GGCGGGGGGGGGGGGCGCGCGCCAGGCGGGGCGGGGCGGGGCGAGGGGCGGGGCGGGGCGAG |
| | | GCGGAGAGGTGCGGCGGCAGCCAATCAGAGCGGCGCGCTCCGAAAGTTTCCTTTTATGGCGA |
| | | GGCGGCGGCGGCGGCGGCCCTATAAAAAGCGAAGCGCGCGGCGGGCGGGAGCAAGCTTCGTT |
| | | TAGTGAACCGTCAGATCGCCTGGAGACGCCATCCACGCTGTTTTGACCTCCATAGAAGACAC |
| | | CGGGACCGATCCAGCCTCCGCGGATTCGAATCCCGGCCGGGAACGGTGCATTGGAACGCGGA |
| | | TTCCCCGTGCCAAGAGTGACGTAAGTACCGCCTATAGAGTCTATAGGCCCACAAAAAATGCT |
| | | TTCTTCTTTTAATATACTTTTTTGTTTATCTTATTTCTAATACTTTCCCTAATCTCTTTCTT |
| | | TCAGGGCAATAATGATACAATGTATCATGCCTCTTTGCACCATTCTAAAGAATAACAGTGAT |
| | | AATTTCTGGGTTAAGGCAATAGCAATATTTCTGCATATAAATATTTCTGCATATAAATTGTA |
| | | ACTGATGTAAGAGGTTTCATATTGCTAATAGCAGCTACAATCCAGCTACCATTCTGCTTTTA |
| | | TTTTATGGTTGGGATAAGGCTGGATTATTCTGAGTCCAAGCTAGGCCCTTTTGCTAATCATG |
| | | TTCATACCTCTTATCTTCCTCCCACAGCTCCTGGGCAACGTGCTGGTCTGTGTGCTGGCCCA |
| | | TCACTTTGGCAAAGAATTGGGATTCGAACCGGTGTGCTGGGCGGGGGGCGGCGGGCCCTCCC |
| | | GCAGAACACCATGCGCTCTTCGGAAGGCTTTGGCTCGGGACTTTCCTGTGATTTGGTAAGTC |
| | | CCGAGCCAAAGCCTTCTGAGGAGCGCCTTGACAGCAGCCATGGGAGGGCCGCCCCCTACCTC |
| | | AGTGACTCGAGGGGTGGCATCCCTGTGACCCCTCCCCAGTGCCTCTCCTGGCCCTGGAAGTT |
| | | GCCACTCCAGTGCCCACCAGCCTTGTCCTAATAAAATTAAGTTGCATCATTTTGTCTGACTA |
| | | GGTGTCCTTCTATAATATTATGGGGTGGAGGGGGGTGGTATGGAGCAAGGGGCAAGTTGGGA |
| | | AGACAACCTGTAGGGCCTGCGGGGTCTATTGGGAACCAAGCTGGAGTGCAGTGGCACAATCT |
| | | TGGCTCACTGCAATCTCCGCCTCCTGGGTTCAAGCGATTCTCCTGCCTCAGCCTCCCGAGTT |
| | | GTTGGGATTCCAGGCATGCATGACCAGGCTCAGCTAATTTTTGTTTTTTTGGTAGAGACGGG |
| | | GTTTCACCATATTGGCCAGGCTGGTCTCCAACTCCTAATCTCAGGTGATCTACCCACCTTGG |
| | | CCTCCCAAATTGCTGGGATTACAGGCGTGAACCACTGCTCCCTTCCCTGTCCTTATCGATGC |
| | | CTAGGGTTAATCATTAACTACAAGGAACCCCTAGTGATGGAGTTGGCCACTCCCTCTCTGCG |
| | | CGCTCGCTCGCTCACTGAGGCCGGGCGACCAAAGGTCGCCCGACGCCCGGGCTTTGCCCGGG |
| | | CGGCCTCAGTGAGCGAGCGAGCGCGCAG |
| VOYTAU68 | 5186 | CTGCGCGCTCGCTCGCTCACTGAGGCCGCCCGGGCAAAGCCCGGGCGTCGGGCGACCTTTGG |
| | | TCGCCCGGCCTCAGTGAGCGAGCGAGCGCGCAGAGAGGGAGTGTAGCCATGCTCTAGGAAGA |
| | | TCAATTCAATTCACGCGTCGACATTGATTATTGACTAGTTATTAATAGTAATCAATTACGGG |
| | | GTCATTAGTTCATAGCCCATATATGGAGTTCCGCGTTACATAACTTACGGTAAATGGCCCGC |
| | | CTGGCTGACCGCCCAACGACCCCCGCCCATTGACGTCAATAATGACGTATGTTCCCATAGTA |
| | | ACGCCAATAGGGACTTTCCATTGACGTCAATGGGTGGAGTATTTACGGTAAACTGCCCACTT |
| | | GGCAGTACATCAAGTGTATCATATGCCAAGTACGCCCCCTATTGACGTCAATGACGGTAAAT |
| | | GGCCCGCCTGGCATTATGCCCAGTACATGACCTTATGGGACTTTCCTACTTGGCAGTACATC |
| | | TACGTATTAGTCATCGCTATTACCATGTCGAGGCCACGTTCTGCTTCACTCTCCCCATCTCC |
| | | CCCCCCTCCCCACCCCCAATTTTGTATTTATTTATTTTTTAATTATTTTGTGCAGCGATGGG |
| | | GGCGGGGGGGGGGGGCGCGCGCCAGGCGGGGCGGGGCGGGGCGAGGGGCGGGGCGGGGCGAG |
| | | GCGGAGAGGTGCGGCGGCAGCCAATCAGAGCGGCGCGCTCCGAAAGTTTCCTTTTATGGCGA |
| | | GGCGGCGGCGGCGGCGGCCCTATAAAAAGCGAAGCGCGCGGCGGGCGGGAGCAAGCTTCGTT |
| | | TAGTGAACCGTCAGATCGCCTGGAGACGCCATCCACGCTGTTTTGACCTCCATAGAAGACAC |
| | | CGGGACCGATCCAGCCTCCGCGGATTCGAATCCCGGCCGGGAACGGTGCATTGGAACGCGGA |
| | | TTCCCCGTGCCAAGAGTGACGTAAGTACCGCCTATAGAGTCTATAGGCCCACAAAAAATGCT |
| | | TTCTTCTTTTAATATACTTTTTTGTTTATCTTATTTCTAATACTTTCCCTAATCTCTTTCTT |
| | | TCAGGGCAATAATGATACAATGTATCATGCCTCTTTGCACCATTCTAAAGAATAACAGTGAT |
| | | AATTTCTGGGTTAAGGCAATAGCAATATTTCTGCATATAAATATTTCTGCATATAAATTGTA |
| | | ACTGATGTAAGAGGTTTCATATTGCTAATAGCAGCTACAATCCAGCTACCATTCTGCTTTTA |
| | | TTTTATGGTTGGGATAAGGCTGGATTATTCTGAGTCCAAGCTAGGCCCTTTTGCTAATCATG |
| | | TTCATACCTCTTATCTTCCTCCCACAGCTCCTGGGCAACGTGCTGGTCTGTGTGCTGGCCCA |
| | | TCACTTTGGCAAAGAATTGGGATTCGAACCGGTGTGCTGGGCGGGGGGCGGCGGGCCCTCCC |
| | | GCAGAACACCATGCGCTCTTCGGAAGACTGGAAGGGATGACAACCCTGTGACCTGGTTTGTC |
| | | ATCGCTTCCAGTCTTCTGTGGAGCGCCTTGACAGCAGCCATGGGAGGGCCGCCCCCTACCTC |
| | | AGTGACTCGAGGGGTGGCATCCCTGTGACCCCTCCCCAGTGCCTCTCCTGGCCCTGGAAGTT |
| | | GCCACTCCAGTGCCCACCAGCCTTGTCCTAATAAAATTAAGTTGCATCATTTTGTCTGACTA |
| | | GGTGTCCTTCTATAATATTATGGGGTGGAGGGGGGTGGTATGGAGCAAGGGGCAAGTTGGGA |
| | | AGACAACCTGTAGGGCCTGCGGGGTCTATTGGGAACCAAGCTGGAGTGCAGTGGCACAATCT |
| | | TGGCTCACTGCAATCTCCGCCTCCTGGGTTCAAGCGATTCTCCTGCCTCAGCCTCCCGAGTT |
| | | GTTGGGATTCCAGGCATGCATGACCAGGCTCAGCTAATTTTTGTTTTTTTGGTAGAGACGGG |
| | | GTTTCACCATATTGGCCAGGCTGGTCTCCAACTCCTAATCTCAGGTGATCTACCCACCTTGG |
| | | CCTCCCAAATTGCTGGGATTACAGGCGTGAACCACTGCTCCCTTCCCTGTCCTTATCGATGC |
| | | CTAGGGTTAATCATTAACTACAAGGAACCCCTAGTGATGGAGTTGGCCACTCCCTCTCTGCG |
| | | CGCTCGCTCGCTCACTGAGGCCGGGCGACCAAAGGTCGCCCGACGCCCGGGCTTTGCCCGGG |
| | | CGGCCTCAGTGAGCGAGCGAGCGCGCAG |
| VOYTAU69 | 5187 | CTGCGCGCTCGCTCGCTCACTGAGGCCGCCCGGGCAAAGCCCGGGCGTCGGGCGACCTTTGG |
| | | TCGCCCGGCCTCAGTGAGCGAGCGAGCGCGCAGAGAGGGAGTGTAGCCATGCTCTAGGAAGA |
| | | TCAATTCAATTCACGCGTCGACATTGATTATTGACTAGTTATTAATAGTAATCAATTACGGG |
| | | GTCATTAGTTCATAGCCCATATATGGAGTTCCGCGTTACATAACTTACGGTAAATGGCCCGC |
| | | CTGGCTGACCGCCCAACGACCCCCGCCCATTGACGTCAATAATGACGTATGTTCCCATAGTA |
| | | ACGCCAATAGGGACTTTCCATTGACGTCAATGGGTGGAGTATTTACGGTAAACTGCCCACTT |
| | | GGCAGTACATCAAGTGTATCATATGCCAAGTACGCCCCCTATTGACGTCAATGACGGTAAAT |
| | | GGCCCGCCTGGCATTATGCCCAGTACATGACCTTATGGGACTTTCCTACTTGGCAGTACATC |
| | | TACGTATTAGTCATCGCTATTACCATGTCGAGGCCACGTTCTGCTTCACTCTCCCCATCTCC |
| | | CCCCCCTCCCCACCCCCAATTTTGTATTTATTTATTTTTTAATTATTTTGTGCAGCGATGGG |
| | | GGCGGGGGGGGGGGGCGCGCGCCAGGCGGGGCGGGGCGGGGCGAGGGGCGGGGCGGGGCGAG |
| | | GCGGAGAGGTGCGGCGGCAGCCAATCAGAGCGGCGCGCTCCGAAAGTTTCCTTTTATGGCGA |
| | | GGCGGCGGCGGCGGCGGCCCTATAAAAAGCGAAGCGCGCGGCGGGGGGGAGCAAGCTTCGTT |
| | | TAGTGAACCGTCAGATCGCCTGGAGACGCCATCCACGCTGTTTTGACCTCCATAGAAGACAC |
| | | CGGGACCGATCCAGCCTCCGCGGATTCGAATCCCGGCCGGGAACGGTGCATTGGAACGCGGA |
| | | TTCCCCGTGCCAAGAGTGACGTAAGTACCGCCTATAGAGTCTATAGGCCCACAAAAAATGCT |
| | | TTCTTCTTTTAATATACTTTTTTGTTTATCTTATTTCTAATACTTTCCCTAATCTCTTTCTT |
| | | TCAGGGCAATAATGATACAATGTATCATGCCTCTTTGCACCATTCTAAAGAATAACAGTGAT |
| | | AATTTCTGGGTTAAGGCAATAGCAATATTTCTGCATATAAATATTTCTGCATATAAATTGTA |
| | | ACTGATGTAAGAGGTTTCATATTGCTAATAGCAGCTACAATCCAGCTACCATTCTGCTTTTA |
| | | TTTTATGGTTGGGATAAGGCTGGATTATTCTGAGTCCAAGCTAGGCCCTTTTGCTAATCATG |
| | | TTCATACCTCTTATCTTCCTCCCACAGCTCCTGGGCAACGTGCTGGTCTGTGTGCTGGCCCA |
| | | TCACTTTGGCAAAGAATTGGGATTCGAACCGGTGTGCTGGGCGGGGGGCGGCGGGCCCTCCC |
| | | GCAGAACACCATGCGCTCTTCGGAACTTCCGCGACAACGCCAACCCTGTGACCTGGTTTGGC |
| | | GTTCTCGCGGAAGTTCTGTGGAGCGCCTTGACAGCAGCCATGGGAGGGCCGCCCCCTACCTC |
| | | AGTGACTCGAGGGGTGGCATCCCTGTGACCCCTCCCCAGTGCCTCTCCTGGCCCTGGAAGTT |
| | | GCCACTCCAGTGCCCACCAGCCTTGTCCTAATAAAATTAAGTTGCATCATTTTGTCTGACTA |
| | | GGTGTCCTTCTATAATATTATGGGGTGGAGGGGGGTGGTATGGAGCAAGGGGCAAGTTGGGA |
| | | AGACAACCTGTAGGGCCTGCGGGGTCTATTGGGAACCAAGCTGGAGTGCAGTGGCACAATCT |
| | | TGGCTCACTGCAATCTCCGCCTCCTGGGTTCAAGCGATTCTCCTGCCTCAGCCTCCCGAGTT |
| | | GTTGGGATTCCAGGCATGCATGACCAGGCTCAGCTAATTTTTGTTTTTTTGGTAGAGACGGG |
| | | GTTTCACCATATTGGCCAGGCTGGTCTCCAACTCCTAATCTCAGGTGATCTACCCACCTTGG |
| | | CCTCCCAAATTGCTGGGATTACAGGCGTGAACCACTGCTCCCTTCCCTGTCCTTATCGATGC |
| | | CTAGGGTTAATCATTAACTACAAGGAACCCCTAGTGATGGAGTTGGCCACTCCCTCTCTGCG |
| | | CGCTCGCTCGCTCACTGAGGCCGGGCGACCAAAGGTCGCCCGACGCCCGGGCTTTGCCCGGG |
| | | CGGCCTCAGTGAGCGAGCGAGCGCGCAG |
| VOYTAU70 | 5188 | CTGCGCGCTCGCTCGCTCACTGAGGCCGCCCGGGCAAAGCCCGGGCGTCGGGCGACCTTTGG |
| | | TCGCCCGGCCTCAGTGAGCGAGCGAGCGCGCAGAGAGGGAGTGTAGCCATGCTCTAGGAAGA |
| | | TCAATTCAATTCACGCGTCGACATTGATTATTGACTAGTTATTAATAGTAATCAATTACGGG |
| | | GTCATTAGTTCATAGCCCATATATGGAGTTCCGCGTTACATAACTTACGGTAAATGGCCCGC |
| | | CTGGCTGACCGCCCAACGACCCCCGCCCATTGACGTCAATAATGACGTATGTTCCCATAGTA |
| | | ACGCCAATAGGGACTTTCCATTGACGTCAATGGGTGGAGTATTTACGGTAAACTGCCCACTT |
| | | GGCAGTACATCAAGTGTATCATATGCCAAGTACGCCCCCTATTGACGTCAATGACGGTAAAT |
| | | GGCCCGCCTGGCATTATGCCCAGTACATGACCTTATGGGACTTTCCTACTTGGCAGTACATC |
| | | TACGTATTAGTCATCGCTATTACCATGTCGAGGCCACGTTCTGCTTCACTCTCCCCATCTCC |
| | | CCCCCCTCCCCACCCCCAATTTTGTATTTATTTATTTTTTAATTATTTTGTGCAGCGATGGG |
| | | GGCGGGGGGGGGGGGCGCGCGCCAGGCGGGGCGGGGCGGGGCGAGGGGCGGGGCGGGGCGAG |
| | | GCGGAGAGGTGCGGCGGCAGCCAATCAGAGCGGCGCGCTCCGAAAGTTTCCTTTTATGGCGA |
| | | GGCGGCGGCGGCGGCGGCCCTATAAAAAGCGAAGCGCGCGGCGGGCGGGAGCAAGCTTCGTT |
| | | TAGTGAACCGTCAGATCGCCTGGAGACGCCATCCACGCTGTTTTGACCTCCATAGAAGACAC |
| | | CGGGACCGATCCAGCCTCCGCGGATTCGAATCCCGGCCGGGAACGGTGCATTGGAACGCGGA |
| | | TTCCCCGTGCCAAGAGTGACGTAAGTACCGCCTATAGAGTCTATAGGCCCACAAAAAATGCT |
| | | TTCTTCTTTTAATATACTTTTTTGTTTATCTTATTTCTAATACTTTCCCTAATCTCTTTCTT |
| | | TCAGGGCAATAATGATACAATGTATCATGCCTCTTTGCACCATTCTAAAGAATAACAGTGAT |
| | | AATTTCTGGGTTAAGGCAATAGCAATATTTCTGCATATAAATATTTCTGCATATAAATTGTA |
| | | ACTGATGTAAGAGGTTTCATATTGCTAATAGCAGCTACAATCCAGCTACCATTCTGCTTTTA |
| | | TTTTATGGTTGGGATAAGGCTGGATTATTCTGAGTCCAAGCTAGGCCCTTTTGCTAATCATG |
| | | TTCATACCTCTTATCTTCCTCCCACAGCTCCTGGGCAACGTGCTGGTCTGTGTGCTGGCCCA |
| | | TCACTTTGGCAAAGAATTGGGATTCGAACCGGTGTGCTGGGCGGGGGGCGGCGGGCCCTCCC |
| | | GCAGAACACCATGCGCTCTTCGGAAGCTCCTCGCTGTTCGGTTCCCTGTGACCTGGTAACCG |
| | | AACTGCGAGGAGCTTCTGTGGAGCGCCTTGACAGCAGCCATGGGAGGGCCGCCCCCTACCTC |
| | | AGTGACTCGAGGGGTGGCATCCCTGTGACCCCTCCCCAGTGCCTCTCCTGGCCCTGGAAGTT |
| | | GCCACTCCAGTGCCCACCAGCCTTGTCCTAATAAAATTAAGTTGCATCATTTTGTCTGACTA |
| | | GGTGTCCTTCTATAATATTATGGGGTGGAGGGGGGTGGTATGGAGCAAGGGGCAAGTTGGGA |
| | | AGACAACCTGTAGGGCCTGCGGGGTCTATTGGGAACCAAGCTGGAGTGCAGTGGCACAATCT |
| | | TGGCTCACTGCAATCTCCGCCTCCTGGGTTCAAGCGATTCTCCTGCCTCAGCCTCCCGAGTT |
| | | GTTGGGATTCCAGGCATGCATGACCAGGCTCAGCTAATTTTTGTTTTTTTGGTAGAGACGGG |
| | | GTTTCACCATATTGGCCAGGCTGGTCTCCAACTCCTAATCTCAGGTGATCTACCCACCTTGG |
| | | CCTCCCAAATTGCTGGGATTACAGGCGTGAACCACTGCTCCCTTCCCTGTCCTTATCGATGC |
| | | CTAGGGTTAATCATTAACTACAAGGAACCCCTAGTGATGGAGTTGGCCACTCCCTCTCTGCG |
| | | CGCTCGCTCGCTCACTGAGGCCGGGCGACCAAAGGTCGCCCGACGCCCGGGCTTTGCCCGGG |
| | | CGGCCTCAGTGAGCGAGCGAGCGCGCAG |
| VOYTAU71 | 5189 | CTGCGCGCTCGCTCGCTCACTGAGGCCGCCCGGGCAAAGCCCGGGCGTCGGGCGACCTTTGG |
| | | TCGCCCGGCCTCAGTGAGCGAGCGAGCGCGCAGAGAGGGAGTGTAGCCATGCTCTAGGAAGA |
| | | TCAATTCAATTCACGCGTCGACATTGATTATTGACTAGTTATTAATAGTAATCAATTACGGG |
| | | GTCATTAGTTCATAGCCCATATATGGAGTTCCGCGTTACATAACTTACGGTAAATGGCCCGC |
| | | CTGGCTGACCGCCCAACGACCCCCGCCCATTGACGTCAATAATGACGTATGTTCCCATAGTA |
| | | ACGCCAATAGGGACTTTCCATTGACGTCAATGGGTGGAGTATTTACGGTAAACTGCCCACTT |
| | | GGCAGTACATCAAGTGTATCATATGCCAAGTACGCCCCCTATTGACGTCAATGACGGTAAAT |
| | | GGCCCGCCTGGCATTATGCCCAGTACATGACCTTATGGGACTTTCCTACTTGGCAGTACATC |
| | | TACGTATTAGTCATCGCTATTACCATGTCGAGGCCACGTTCTGCTTCACTCTCCCCATCTCC |
| | | CCCCCCTCCCCACCCCCAATTTTGTATTTATTTATTTTTTAATTATTTTGTGCAGCGATGGG |
| | | GGCGGGGGGGGGGGGCGCGCGCCAGGCGGGGCGGGGCGGGGCGAGGGGCGGGGCGGGGCGAG |
| | | GCGGAGAGGTGCGGCGGCAGCCAATCAGAGCGGCGCGCTCCGAAAGTTTCCTTTTATGGCGA |
| | | GGCGGCGGCGGCGGCGGCCCTATAAAAAGCGAAGCGCGCGGCGGGCGGGAGCAAGCTTCGTT |
| | | TAGTGAACCGTCAGATCGCCTGGAGACGCCATCCACGCTGTTTTGACCTCCATAGAAGACAC |
| | | CGGGACCGATCCAGCCTCCGCGGATTCGAATCCCGGCCGGGAACGGTGCATTGGAACGCGGA |
| | | TTCCCCGTGCCAAGAGTGACGTAAGTACCGCCTATAGAGTCTATAGGCCCACAAAAAATGCT |
| | | TTCTTCTTTTAATATACTTTTTTGTTTATCTTATTTCTAATACTTTCCCTAATCTCTTTCTT |
| | | TCAGGGCAATAATGATACAATGTATCATGCCTCTTTGCACCATTCTAAAGAATAACAGTGAT |
| | | AATTTCTGGGTTAAGGCAATAGCAATATTTCTGCATATAAATATTTCTGCATATAAATTGTA |
| | | ACTGATGTAAGAGGTTTCATATTGCTAATAGCAGCTACAATCCAGCTACCATTCTGCTTTTA |
| | | TTTTATGGTTGGGATAAGGCTGGATTATTCTGAGTCCAAGCTAGGCCCTTTTGCTAATCATG |
| | | TTCATACCTCTTATCTTCCTCCCACAGCTCCTGGGCAACGTGCTGGTCTGTGTGCTGGCCCA |
| | | TCACTTTGGCAAAGAATTGGGATTCGAACCGGTGTGCTGGGCGGGGGGGGGGGGGCCCTCCC |
| | | GCAGAACACCATGCGCTCTTCGGAAGGCTTTGGCACGGGACTTCCCTGTGACCTGGTAAGTC |
| | | CCGAGCCAAAGCCTTCTGTGGAGCGCCTTGACAGCAGCCATGGGAGGGCCGCCCCCTACCTC |
| | | AGTGACTCGAGGGGTGGCATCCCTGTGACCCCTCCCCAGTGCCTCTCCTGGCCCTGGAAGTT |
| | | GCCACTCCAGTGCCCACCAGCCTTGTCCTAATAAAATTAAGTTGCATCATTTTGTCTGACTA |
| | | GGTGTCCTTCTATAATATTATGGGGTGGAGGGGGGTGGTATGGAGCAAGGGGCAAGTTGGGA |
| | | AGACAACCTGTAGGGCCTGCGGGGTCTATTGGGAACCAAGCTGGAGTGCAGTGGCACAATCT |
| | | TGGCTCACTGCAATCTCCGCCTCCTGGGTTCAAGCGATTCTCCTGCCTCAGCCTCCCGAGTT |
| | | GTTGGGATTCCAGGCATGCATGACCAGGCTCAGCTAATTTTTGTTTTTTTGGTAGAGACGGG |
| | | GTTTCACCATATTGGCCAGGCTGGTCTCCAACTCCTAATCTCAGGTGATCTACCCACCTTGG |
| | | CCTCCCAAATTGCTGGGATTACAGGCGTGAACCACTGCTCCCTTCCCTGTCCTTATCGATGC |
| | | CTAGGGTTAATCATTAACTACAAGGAACCCCTAGTGATGGAGTTGGCCACTCCCTCTCTGCG |
| | | CGCTCGCTCGCTCACTGAGGCCGGGCGACCAAAGGTCGCCCGACGCCCGGGCTTTGCCCGGG |
| | | CGGCCTCAGTGAGCGAGCGAGCGCGCAG |
| VOYTAU72 | 5190 | CTGCGCGCTCGCTCGCTCACTGAGGCCGCCCGGGCAAAGCCCGGGCGTCGGGCGACCTTTGG |
| | | TCGCCCGGCCTCAGTGAGCGAGCGAGCGCGCAGAGAGGGAGTGTAGCCATGCTCTAGGAAGA |
| | | TCAATTCAATTCACGCGTCGACATTGATTATTGACTAGTTATTAATAGTAATCAATTACGGG |
| | | GTCATTAGTTCATAGCCCATATATGGAGTTCCGCGTTACATAACTTACGGTAAATGGCCCGC |
| | | CTGGCTGACCGCCCAACGACCCCCGCCCATTGACGTCAATAATGACGTATGTTCCCATAGTA |
| | | ACGCCAATAGGGACTTTCCATTGACGTCAATGGGTGGAGTATTTACGGTAAACTGCCCACTT |
| | | GGCAGTACATCAAGTGTATCATATGCCAAGTACGCCCCCTATTGACGTCAATGACGGTAAAT |
| | | GGCCCGCCTGGCATTATGCCCAGTACATGACCTTATGGGACTTTCCTACTTGGCAGTACATC |
| | | TACGTATTAGTCATCGCTATTACCATGTCGAGGCCACGTTCTGCTTCACTCTCCCCATCTCC |
| | | CCCCCCTCCCCACCCCCAATTTTGTATTTATTTATTTTTTAATTATTTTGTGCAGCGATGGG |
| | | GGCGGGGGGGGGGGGCGCGCGCCAGGCGGGGCGGGGCGGGGCGAGGGGCGGGGCGGGGCGAG |
| | | GCGGAGAGGTGCGGCGGCAGCCAATCAGAGCGGCGCGCTCCGAAAGTTTCCTTTTATGGCGA |
| | | GGCGGCGGCGGCGGCGGCCCTATAAAAAGCGAAGCGCGCGGCGGGCGGGAGCAAGCTTCGTT |
| | | TAGTGAACCGTCAGATCGCCTGGAGACGCCATCCACGCTGTTTTGACCTCCATAGAAGACAC |
| | | CGGGACCGATCCAGCCTCCGCGGATTCGAATCCCGGCCGGGAACGGTGCATTGGAACGCGGA |
| | | TTCCCCGTGCCAAGAGTGACGTAAGTACCGCCTATAGAGTCTATAGGCCCACAAAAAATGCT |
| | | TTCTTCTTTTAATATACTTTTTTGTTTATCTTATTTCTAATACTTTCCCTAATCTCTTTCTT |
| | | TCAGGGCAATAATGATACAATGTATCATGCCTCTTTGCACCATTCTAAAGAATAACAGTGAT |
| | | AATTTCTGGGTTAAGGCAATAGCAATATTTCTGCATATAAATATTTCTGCATATAAATTGTA |
| | | ACTGATGTAAGAGGTTTCATATTGCTAATAGCAGCTACAATCCAGCTACCATTCTGCTTTTA |
| | | TTTTATGGTTGGGATAAGGCTGGATTATTCTGAGTCCAAGCTAGGCCCTTTTGCTAATCATG |
| | | TTCATACCTCTTATCTTCCTCCCACAGCTCCTGGGCAACGTGCTGGTCTGTGTGCTGGCCCA |
| | | TCACTTTGGCAAAGAATTGGGATTCGAACCGGTGTGCTGGGCGGGGGGCGGCGGGCCCTCCC |
| | | GCAGAACACCATGCGCTCTTCGGAAGACTGGAAGCGATGACAAGCCTGTGACCTGGTTTGTC |
| | | ATCGCTTCCAGTCTTCTGTGGAGCGCCTTGACAGCAGCCATGGGAGGGCCGCCCCCTACCTC |
| | | AGTGACTCGAGGGGTGGCATCCCTGTGACCCCTCCCCAGTGCCTCTCCTGGCCCTGGAAGTT |
| | | GCCACTCCAGTGCCCACCAGCCTTGTCCTAATAAAATTAAGTTGCATCATTTTGTCTGACTA |
| | | GGTGTCCTTCTATAATATTATGGGGTGGAGGGGGGTGGTATGGAGCAAGGGGCAAGTTGGGA |
| | | AGACAACCTGTAGGGCCTGCGGGGTCTATTGGGAACCAAGCTGGAGTGCAGTGGCACAATCT |
| | | TGGCTCACTGCAATCTCCGCCTCCTGGGTTCAAGCGATTCTCCTGCCTCAGCCTCCCGAGTT |
| | | GTTGGGATTCCAGGCATGCATGACCAGGCTCAGCTAATTTTTGTTTTTTTGGTAGAGACGGG |
| | | GTTTCACCATATTGGCCAGGCTGGTCTCCAACTCCTAATCTCAGGTGATCTACCCACCTTGG |
| | | CCTCCCAAATTGCTGGGATTACAGGCGTGAACCACTGCTCCCTTCCCTGTCCTTATCGATGC |
| | | CTAGGGTTAATCATTAACTACAAGGAACCCCTAGTGATGGAGTTGGCCACTCCCTCTCTGCG |
| | | CGCTCGCTCGCTCACTGAGGCCGGGCGACCAAAGGTCGCCCGACGCCCGGGCTTTGCCCGGG |
| | | CGGCCTCAGTGAGCGAGCGAGCGCGCAG |
| VOYTAU73 | 5191 | CTGCGCGCTCGCTCGCTCACTGAGGCCGCCCGGGCAAAGCCCGGGCGTCGGGCGACCTTTGG |
| | | TCGCCCGGCCTCAGTGAGCGAGCGAGCGCGCAGAGAGGGAGTGTAGCCATGCTCTAGGAAGA |
| | | TCAATTCAATTCACGCGTCGACATTGATTATTGACTAGTTATTAATAGTAATCAATTACGGG |
| | | GTCATTAGTTCATAGCCCATATATGGAGTTCCGCGTTACATAACTTACGGTAAATGGCCCGC |
| | | CTGGCTGACCGCCCAACGACCCCCGCCCATTGACGTCAATAATGACGTATGTTCCCATAGTA |
| | | ACGCCAATAGGGACTTTCCATTGACGTCAATGGGTGGAGTATTTACGGTAAACTGCCCACTT |
| | | GGCAGTACATCAAGTGTATCATATGCCAAGTACGCCCCCTATTGACGTCAATGACGGTAAAT |
| | | GGCCCGCCTGGCATTATGCCCAGTACATGACCTTATGGGACTTTCCTACTTGGCAGTACATC |
| | | TACGTATTAGTCATCGCTATTACCATGTCGAGGCCACGTTCTGCTTCACTCTCCCCATCTCC |
| | | CCCCCCTCCCCACCCCCAATTTTGTATTTATTTATTTTTTAATTATTTTGTGCAGCGATGGG |
| | | GGCGGGGGGGGGGGGCGCGCGCCAGGCGGGGCGGGGCGGGGCGAGGGGCGGGGCGGGGCGAG |
| | | GCGGAGAGGTGCGGCGGCAGCCAATCAGAGCGGCGCGCTCCGAAAGTTTCCTTTTATGGCGA |
| | | GGCGGCGGCGGCGGCGGCCCTATAAAAAGCGAAGCGCGCGGCGGGCGGGAGCAAGCTTCGTT |
| | | TAGTGAACCGTCAGATCGCCTGGAGACGCCATCCACGCTGTTTTGACCTCCATAGAAGACAC |
| | | CGGGACCGATCCAGCCTCCGCGGATTCGAATCCCGGCCGGGAACGGTGCATTGGAACGCGGA |
| | | TTCCCCGTGCCAAGAGTGACGTAAGTACCGCCTATAGAGTCTATAGGCCCACAAAAAATGCT |
| | | TTCTTCTTTTAATATACTTTTTTGTTTATCTTATTTCTAATACTTTCCCTAATCTCTTTCTT |
| | | TCAGGGCAATAATGATACAATGTATCATGCCTCTTTGCACCATTCTAAAGAATAACAGTGAT |
| | | AATTTCTGGGTTAAGGCAATAGCAATATTTCTGCATATAAATATTTCTGCATATAAATTGTA |
| | | ACTGATGTAAGAGGTTTCATATTGCTAATAGCAGCTACAATCCAGCTACCATTCTGCTTTTA |
| | | TTTTATGGTTGGGATAAGGCTGGATTATTCTGAGTCCAAGCTAGGCCCTTTTGCTAATCATG |
| | | TTCATACCTCTTATCTTCCTCCCACAGCTCCTGGGCAACGTGCTGGTCTGTGTGCTGGCCCA |
| | | TCACTTTGGCAAAGAATTGGGATTCGAACCGGTGTGCTGGGCGGGGGGCGGCGGGCCCTCCC |
| | | GCAGAACACCATGCGCTCTTCGGAACTTCCGCGAGAACGCCAAGCCTGTGACCTGGTTTGGC |
| | | GTTCTCGCGGAAGTTCTGTGGAGCGCCTTGACAGCAGCCATGGGAGGGCCGCCCCCTACCTC |
| | | AGTGACTCGAGGGGTGGCATCCCTGTGACCCCTCCCCAGTGCCTCTCCTGGCCCTGGAAGTT |
| | | GCCACTCCAGTGCCCACCAGCCTTGTCCTAATAAAATTAAGTTGCATCATTTTGTCTGACTA |
| | | GGTGTCCTTCTATAATATTATGGGGTGGAGGGGGGTGGTATGGAGCAAGGGGCAAGTTGGGA |
| | | AGACAACCTGTAGGGCCTGCGGGGTCTATTGGGAACCAAGCTGGAGTGCAGTGGCACAATCT |
| | | TGGCTCACTGCAATCTCCGCCTCCTGGGTTCAAGCGATTCTCCTGCCTCAGCCTCCCGAGTT |
| | | GTTGGGATTCCAGGCATGCATGACCAGGCTCAGCTAATTTTTGTTTTTTTGGTAGAGACGGG |
| | | GTTTCACCATATTGGCCAGGCTGGTCTCCAACTCCTAATCTCAGGTGATCTACCCACCTTGG |
| | | CCTCCCAAATTGCTGGGATTACAGGCGTGAACCACTGCTCCCTTCCCTGTCCTTATCGATGC |
| | | CTAGGGTTAATCATTAACTACAAGGAACCCCTAGTGATGGAGTTGGCCACTCCCTCTCTGCG |
| | | CGCTCGCTCGCTCACTGAGGCCGGGCGACCAAAGGTCGCCCGACGCCCGGGCTTTGCCCGGG |
| | | CGGCCTCAGTGAGCGAGCGAGCGCGCAG |
| VOYTAU74 | 5192 | CTGCGCGCTCGCTCGCTCACTGAGGCCGCCCGGGCAAAGCCCGGGCGTCGGGCGACCTTTGG |
| | | TCGCCCGGCCTCAGTGAGCGAGCGAGCGCGCAGAGAGGGAGTGTAGCCATGCTCTAGGAAGA |
| | | TCAATTCAATTCACGCGTCGACATTGATTATTGACTAGTTATTAATAGTAATCAATTACGGG |
| | | GTCATTAGTTCATAGCCCATATATGGAGTTCCGCGTTACATAACTTACGGTAAATGGCCCGC |
| | | CTGGCTGACCGCCCAACGACCCCCGCCCATTGACGTCAATAATGACGTATGTTCCCATAGTA |
| | | ACGCCAATAGGGACTTTCCATTGACGTCAATGGGTGGAGTATTTACGGTAAACTGCCCACTT |
| | | GGCAGTACATCAAGTGTATCATATGCCAAGTACGCCCCCTATTGACGTCAATGACGGTAAAT |
| | | GGCCCGCCTGGCATTATGCCCAGTACATGACCTTATGGGACTTTCCTACTTGGCAGTACATC |
| | | TACGTATTAGTCATCGCTATTACCATGTCGAGGCCACGTTCTGCTTCACTCTCCCCATCTCC |
| | | CCCCCCTCCCCACCCCCAATTTTGTATTTATTTATTTTTTAATTATTTTGTGCAGCGATGGG |
| | | GGCGGGGGGGGGGGGCGCGCGCCAGGCGGGGCGGGGCGGGGCGAGGGGCGGGGCGGGGCGAG |
| | | GCGGAGAGGTGCGGCGGCAGCCAATCAGAGCGGCGCGCTCCGAAAGTTTCCTTTTATGGCGA |
| | | GGCGGCGGCGGCGGCGGCCCTATAAAAAGCGAAGCGCGCGGCGGGCGGGAGCAAGCTTCGTT |
| | | TAGTGAACCGTCAGATCGCCTGGAGACGCCATCCACGCTGTTTTGACCTCCATAGAAGACAC |
| | | CGGGACCGATCCAGCCTCCGCGGATTCGAATCCCGGCCGGGAACGGTGCATTGGAACGCGGA |
| | | TTCCCCGTGCCAAGAGTGACGTAAGTACCGCCTATAGAGTCTATAGGCCCACAAAAAATGCT |
| | | TTCTTCTTTTAATATACTTTTTTGTTTATCTTATTTCTAATACTTTCCCTAATCTCTTTCTT |
| | | TCAGGGCAATAATGATACAATGTATCATGCCTCTTTGCACCATTCTAAAGAATAACAGTGAT |
| | | AATTTCTGGGTTAAGGCAATAGCAATATTTCTGCATATAAATATTTCTGCATATAAATTGTA |
| | | ACTGATGTAAGAGGTTTCATATTGCTAATAGCAGCTACAATCCAGCTACCATTCTGCTTTTA |
| | | TTTTATGGTTGGGATAAGGCTGGATTATTCTGAGTCCAAGCTAGGCCCTTTTGCTAATCATG |
| | | TTCATACCTCTTATCTTCCTCCCACAGCTCCTGGGCAACGTGCTGGTCTGTGTGCTGGCCCA |
| | | TCACTTTGGCAAAGAATTGGGATTCGAACCGGTGTGCTGGGCGGGGGGCGGCGGGCCCTCCC |
| | | GCAGAACACCATGCGCTCTTCGGAAGCTCCTCGCAGTTCGGTTGCCTGTGACCTGGTAACCG |
| | | AACTGCGAGGAGCTTCTGTGGAGCGCCTTGACAGCAGCCATGGGAGGGCCGCCCCCTACCTC |
| | | AGTGACTCGAGGGGTGGCATCCCTGTGACCCCTCCCCAGTGCCTCTCCTGGCCCTGGAAGTT |
| | | GCCACTCCAGTGCCCACCAGCCTTGTCCTAATAAAATTAAGTTGCATCATTTTGTCTGACTA |
| | | GGTGTCCTTCTATAATATTATGGGGTGGAGGGGGGTGGTATGGAGCAAGGGGCAAGTTGGGA |
| | | AGACAACCTGTAGGGCCTGCGGGGTCTATTGGGAACCAAGCTGGAGTGCAGTGGCACAATCT |
| | | TGGCTCACTGCAATCTCCGCCTCCTGGGTTCAAGCGATTCTCCTGCCTCAGCCTCCCGAGTT |
| | | GTTGGGATTCCAGGCATGCATGACCAGGCTCAGCTAATTTTTGTTTTTTTGGTAGAGACGGG |
| | | GTTTCACCATATTGGCCAGGCTGGTCTCCAACTCCTAATCTCAGGTGATCTACCCACCTTGG |
| | | CCTCCCAAATTGCTGGGATTACAGGCGTGAACCACTGCTCCCTTCCCTGTCCTTATCGATGC |
| | | CTAGGGTTAATCATTAACTACAAGGAACCCCTAGTGATGGAGTTGGCCACTCCCTCTCTGCG |
| | | CGCTCGCTCGCTCACTGAGGCCGGGCGACCAAAGGTCGCCCGACGCCCGGGCTTTGCCCGGG |
| | | CGGCCTCAGTGAGCGAGCGAGCGCGCAG |
| VOYTAU75 | 5193 | CTGCGCGCTCGCTCGCTCACTGAGGCCGCCCGGGCAAAGCCCGGGCGTCGGGCGACCTTTGG |
| | | TCGCCCGGCCTCAGTGAGCGAGCGAGCGCGCAGAGAGGGAGTGTAGCCATGCTCTAGGAAGA |
| | | TCAATTCAATTCACGCGTCGACATTGATTATTGACTAGTTATTAATAGTAATCAATTACGGG |
| | | GTCATTAGTTCATAGCCCATATATGGAGTTCCGCGTTACATAACTTACGGTAAATGGCCCGC |
| | | CTGGCTGACCGCCCAACGACCCCCGCCCATTGACGTCAATAATGACGTATGTTCCCATAGTA |
| | | ACGCCAATAGGGACTTTCCATTGACGTCAATGGGTGGAGTATTTACGGTAAACTGCCCACTT |
| | | GGCAGTACATCAAGTGTATCATATGCCAAGTACGCCCCCTATTGACGTCAATGACGGTAAAT |
| | | GGCCCGCCTGGCATTATGCCCAGTACATGACCTTATGGGACTTTCCTACTTGGCAGTACATC |
| | | TACGTATTAGTCATCGCTATTACCATGTCGAGGCCACGTTCTGCTTCACTCTCCCCATCTCC |
| | | CCCCCCTCCCCACCCCCAATTTTGTATTTATTTATTTTTTAATTATTTTGTGCAGCGATGGG |
| | | GGCGGGGGGGGGGGGCGCGCGCCAGGCGGGGCGGGGCGGGGCGAGGGGCGGGGCGGGGCGAG |
| | | GCGGAGAGGTGCGGCGGCAGCCAATCAGAGCGGCGCGCTCCGAAAGTTTCCTTTTATGGCGA |
| | | GGCGGCGGCGGCGGCGGCCCTATAAAAAGCGAAGCGCGCGGCGGGCGGGAGCAAGCTTCGTT |
| | | TAGTGAACCGTCAGATCGCCTGGAGACGCCATCCACGCTGTTTTGACCTCCATAGAAGACAC |
| | | CGGGACCGATCCAGCCTCCGCGGATTCGAATCCCGGCCGGGAACGGTGCATTGGAACGCGGA |
| | | TTCCCCGTGCCAAGAGTGACGTAAGTACCGCCTATAGAGTCTATAGGCCCACAAAAAATGCT |
| | | TTCTTCTTTTAATATACTTTTTTGTTTATCTTATTTCTAATACTTTCCCTAATCTCTTTCTT |
| | | TCAGGGCAATAATGATACAATGTATCATGCCTCTTTGCACCATTCTAAAGAATAACAGTGAT |
| | | AATTTCTGGGTTAAGGCAATAGCAATATTTCTGCATATAAATATTTCTGCATATAAATTGTA |
| | | ACTGATGTAAGAGGTTTCATATTGCTAATAGCAGCTACAATCCAGCTACCATTCTGCTTTTA |
| | | TTTTATGGTTGGGATAAGGCTGGATTATTCTGAGTCCAAGCTAGGCCCTTTTGCTAATCATG |
| | | TTCATACCTCTTATCTTCCTCCCACAGCTCCTGGGCAACGTGCTGGTCTGTGTGCTGGCCCA |
| | | TCACTTTGGCAAAGAATTGGGATTCGAACCGGTGTGCTGGGCGGGGGGGGGGGGGCCCTCCC |
| | | GCAGAACACCATGCGCTCTTCGGAAGGCTTTGGCTCGGGACTTGCCTGTGACCTGGTAAGTC |
| | | CCGAGCCAAAGCCTTCTGTGGAGCGCCTTGACAGCAGCCATGGGAGGGCCGCCCCCTACCTC |
| | | AGTGACTCGAGGGGTGGCATCCCTGTGACCCCTCCCCAGTGCCTCTCCTGGCCCTGGAAGTT |
| | | GCCACTCCAGTGCCCACCAGCCTTGTCCTAATAAAATTAAGTTGCATCATTTTGTCTGACTA |
| | | GGTGTCCTTCTATAATATTATGGGGTGGAGGGGGGTGGTATGGAGCAAGGGGCAAGTTGGGA |
| | | AGACAACCTGTAGGGCCTGCGGGGTCTATTGGGAACCAAGCTGGAGTGCAGTGGCACAATCT |
| | | TGGCTCACTGCAATCTCCGCCTCCTGGGTTCAAGCGATTCTCCTGCCTCAGCCTCCCGAGTT |
| | | GTTGGGATTCCAGGCATGCATGACCAGGCTCAGCTAATTTTTGTTTTTTTGGTAGAGACGGG |
| | | GTTTCACCATATTGGCCAGGCTGGTCTCCAACTCCTAATCTCAGGTGATCTACCCACCTTGG |
| | | CCTCCCAAATTGCTGGGATTACAGGCGTGAACCACTGCTCCCTTCCCTGTCCTTATCGATGC |
| | | CTAGGGTTAATCATTAACTACAAGGAACCCCTAGTGATGGAGTTGGCCACTCCCTCTCTGCG |
| | | CGCTCGCTCGCTCACTGAGGCCGGGCGACCAAAGGTCGCCCGACGCCCGGGCTTTGCCCGGG |
| | | CGGCCTCAGTGAGCGAGCGAGCGCGCAG |
| VOYTAU76 | 5194 | CTGCGCGCTCGCTCGCTCACTGAGGCCGCCCGGGCAAAGCCCGGGCGTCGGGCGACCTTTGG |
| | | TCGCCCGGCCTCAGTGAGCGAGCGAGCGCGCAGAGAGGGAGTGTAGCCATGCTCTAGGAAGA |
| | | TCAATTCAATTCACGCGTCGACATTGATTATTGACTAGTTATTAATAGTAATCAATTACGGG |
| | | GTCATTAGTTCATAGCCCATATATGGAGTTCCGCGTTACATAACTTACGGTAAATGGCCCGC |
| | | CTGGCTGACCGCCCAACGACCCCCGCCCATTGACGTCAATAATGACGTATGTTCCCATAGTA |
| | | ACGCCAATAGGGACTTTCCATTGACGTCAATGGGTGGAGTATTTACGGTAAACTGCCCACTT |
| | | GGCAGTACATCAAGTGTATCATATGCCAAGTACGCCCCCTATTGACGTCAATGACGGTAAAT |
| | | GGCCCGCCTGGCATTATGCCCAGTACATGACCTTATGGGACTTTCCTACTTGGCAGTACATC |
| | | TACGTATTAGTCATCGCTATTACCATGTCGAGGCCACGTTCTGCTTCACTCTCCCCATCTCC |
| | | CCCCCCTCCCCACCCCCAATTTTGTATTTATTTATTTTTTAATTATTTTGTGCAGCGATGGG |
| | | GGCGGGGGGGGGGGGCGCGCGCCAGGCGGGGCGGGGCGGGGCGAGGGGCGGGGCGGGGCGAG |
| | | GCGGAGAGGTGCGGCGGCAGCCAATCAGAGCGGCGCGCTCCGAAAGTTTCCTTTTATGGCGA |
| | | GGCGGCGGCGGCGGCGGCCCTATAAAAAGCGAAGCGCGCGGCGGGCGGGAGCAAGCTTCGTT |
| | | TAGTGAACCGTCAGATCGCCTGGAGACGCCATCCACGCTGTTTTGACCTCCATAGAAGACAC |
| | | CGGGACCGATCCAGCCTCCGCGGATTCGAATCCCGGCCGGGAACGGTGCATTGGAACGCGGA |
| | | TTCCCCGTGCCAAGAGTGACGTAAGTACCGCCTATAGAGTCTATAGGCCCACAAAAAATGCT |
| | | TTCTTCTTTTAATATACTTTTTTGTTTATCTTATTTCTAATACTTTCCCTAATCTCTTTCTT |
| | | TCAGGGCAATAATGATACAATGTATCATGCCTCTTTGCACCATTCTAAAGAATAACAGTGAT |
| | | AATTTCTGGGTTAAGGCAATAGCAATATTTCTGCATATAAATATTTCTGCATATAAATTGTA |
| | | ACTGATGTAAGAGGTTTCATATTGCTAATAGCAGCTACAATCCAGCTACCATTCTGCTTTTA |
| | | TTTTATGGTTGGGATAAGGCTGGATTATTCTGAGTCCAAGCTAGGCCCTTTTGCTAATCATG |
| | | TTCATACCTCTTATCTTCCTCCCACAGCTCCTGGGCAACGTGCTGGTCTGTGTGCTGGCCCA |
| | | TCACTTTGGCAAAGAATTGGGATTCGAACCGGTGAAGCAAAGAAGGGGCAGAGGGAGCCCGT |
| | | GAGCTGAGTGGGCCAGGGACTGGGAGAAGGAGTGAGGAGGCAGGGCCGGCATGCCTCTGCTG |
| | | CTGGCCAGACTTCCGCGAGAACGCCAATCTGTCTGCACCTGTCACTAGTTTGGCGTTCTCGC |
| | | GGAAGTTTGGCCGTGTAGTGCTACCCAGCGCTGGCTGCCTCCTCAGCATTGCAATTCCTCTC |
| | | CCATCTGGGCACCAGTCAGCTACCCTGGTGGGAATCTGGGTAGCCCTCGAGGGGTGGCATCC |
| | | CTGTGACCCCTCCCCAGTGCCTCTCCTGGCCCTGGAAGTTGCCACTCCAGTGCCCACCAGCC |
| | | TTGTCCTAATAAAATTAAGTTGCATCATTTTGTCTGACTAGGTGTCCTTCTATAATATTATG |
| | | GGGTGGAGGGGGGTGGTATGGAGCAAGGGGCAAGTTGGGAAGACAACCTGTAGGGCCTGCGG |
| | | GGTCTATTGGGAACCAAGCTGGAGTGCAGTGGCACAATCTTGGCTCACTGCAATCTCCGCCT |
| | | CCTGGGTTCAAGCGATTCTCCTGCCTCAGCCTCCCGAGTTGTTGGGATTCCAGGCATGCATG |
| | | ACCAGGCTCAGCTAATTTTTGTTTTTTTGGTAGAGACGGGGTTTCACCATATTGGCCAGGCT |
| | | GGTCTCCAACTCCTAATCTCAGGTGATCTACCCACCTTGGCCTCCCAAATTGCTGGGATTAC |
| | | AGGCGTGAACCACTGCTCCCTTCCCTGTCCTTATCGATGCCTAGGGTTAATCATTAACTACA |
| | | AGGAACCCCTAGTGATGGAGTTGGCCACTCCCTCTCTGCGCGCTCGCTCGCTCACTGAGGCC |
| | | GGGCGACCAAAGGTCGCCCGACGCCCGGGCTTTGCCCGGGCGGCCTCAGTGAGCGAGCGAGC |
| | | GCGCAG |
| VOYTAU77 | 5195 | CTGCGCGCTCGCTCGCTCACTGAGGCCGCCCGGGCAAAGCCCGGGCGTCGGGCGACCTTTGG |
| | | TCGCCCGGCCTCAGTGAGCGAGCGAGCGCGCAGAGAGGGAGTGTAGCCATGCTCTAGGAAGA |
| | | TCAATTCAATTCACGCGTCGACATTGATTATTGACTAGTTATTAATAGTAATCAATTACGGG |
| | | GTCATTAGTTCATAGCCCATATATGGAGTTCCGCGTTACATAACTTACGGTAAATGGCCCGC |
| | | CTGGCTGACCGCCCAACGACCCCCGCCCATTGACGTCAATAATGACGTATGTTCCCATAGTA |
| | | ACGCCAATAGGGACTTTCCATTGACGTCAATGGGTGGAGTATTTACGGTAAACTGCCCACTT |
| | | GGCAGTACATCAAGTGTATCATATGCCAAGTACGCCCCCTATTGACGTCAATGACGGTAAAT |
| | | GGCCCGCCTGGCATTATGCCCAGTACATGACCTTATGGGACTTTCCTACTTGGCAGTACATC |
| | | TACGTATTAGTCATCGCTATTACCATGTCGAGGCCACGTTCTGCTTCACTCTCCCCATCTCC |
| | | CCCCCCTCCCCACCCCCAATTTTGTATTTATTTATTTTTTAATTATTTTGTGCAGCGATGGG |
| | | GGCGGGGGGGGGGGGCGCGCGCCAGGCGGGGCGGGGCGGGGCGAGGGGCGGGGCGGGGCGAG |
| | | GCGGAGAGGTGCGGCGGCAGCCAATCAGAGCGGCGCGCTCCGAAAGTTTCCTTTTATGGCGA |
| | | GGCGGCGGCGGCGGCGGCCCTATAAAAAGCGAAGCGCGCGGCGGGCGGGAGCAAGCTTCGTT |
| | | TAGTGAACCGTCAGATCGCCTGGAGACGCCATCCACGCTGTTTTGACCTCCATAGAAGACAC |
| | | CGGGACCGATCCAGCCTCCGCGGATTCGAATCCCGGCCGGGAACGGTGCATTGGAACGCGGA |
| | | TTCCCCGTGCCAAGAGTGACGTAAGTACCGCCTATAGAGTCTATAGGCCCACAAAAAATGCT |
| | | TTCTTCTTTTAATATACTTTTTTGTTTATCTTATTTCTAATACTTTCCCTAATCTCTTTCTT |
| | | TCAGGGCAATAATGATACAATGTATCATGCCTCTTTGCACCATTCTAAAGAATAACAGTGAT |
| | | AATTTCTGGGTTAAGGCAATAGCAATATTTCTGCATATAAATATTTCTGCATATAAATTGTA |
| | | ACTGATGTAAGAGGTTTCATATTGCTAATAGCAGCTACAATCCAGCTACCATTCTGCTTTTA |
| | | TTTTATGGTTGGGATAAGGCTGGATTATTCTGAGTCCAAGCTAGGCCCTTTTGCTAATCATG |
| | | TTCATACCTCTTATCTTCCTCCCACAGCTCCTGGGCAACGTGCTGGTCTGTGTGCTGGCCCA |
| | | TCACTTTGGCAAAGAATTGGGATTCGAACCGGTGAAGCAAAGAAGGGGCAGAGGGAGCCCGT |
| | | GAGCTGAGTGGGCCAGGGACTGGGAGAAGGAGTGAGGAGGCAGGGCCGGCATGCCTCTGCTG |
| | | CTGGCCAGAGCTCCTCGCAGTTCGGTTTCTGTCTGCACCTGTCACTAGTAACCGAACTGCGA |
| | | GGAGCTTTGGCCGTGTAGTGCTACCCAGCGCTGGCTGCCTCCTCAGCATTGCAATTCCTCTC |
| | | CCATCTGGGCACCAGTCAGCTACCCTGGTGGGAATCTGGGTAGCCCTCGAGGGGTGGCATCC |
| | | CTGTGACCCCTCCCCAGTGCCTCTCCTGGCCCTGGAAGTTGCCACTCCAGTGCCCACCAGCC |
| | | TTGTCCTAATAAAATTAAGTTGCATCATTTTGTCTGACTAGGTGTCCTTCTATAATATTATG |
| | | GGGTGGAGGGGGGTGGTATGGAGCAAGGGGCAAGTTGGGAAGACAACCTGTAGGGCCTGCGG |
| | | GGTCTATTGGGAACCAAGCTGGAGTGCAGTGGCACAATCTTGGCTCACTGCAATCTCCGCCT |
| | | CCTGGGTTCAAGCGATTCTCCTGCCTCAGCCTCCCGAGTTGTTGGGATTCCAGGCATGCATG |
| | | ACCAGGCTCAGCTAATTTTTGTTTTTTTGGTAGAGACGGGGTTTCACCATATTGGCCAGGCT |
| | | GGTCTCCAACTCCTAATCTCAGGTGATCTACCCACCTTGGCCTCCCAAATTGCTGGGATTAC |
| | | AGGCGTGAACCACTGCTCCCTTCCCTGTCCTTATCGATGCCTAGGGTTAATCATTAACTACA |
| | | AGGAACCCCTAGTGATGGAGTTGGCCACTCCCTCTCTGCGCGCTCGCTCGCTCACTGAGGCC |
| | | GGGCGACCAAAGGTCGCCCGACGCCCGGGCTTTGCCCGGGCGGCCTCAGTGAGCGAGCGAGC |
| | | GCGCAG |
| VOYTAU78 | 5196 | CTGCGCGCTCGCTCGCTCACTGAGGCCGCCCGGGCAAAGCCCGGGCGTCGGGCGACCTTTGG |
| | | TCGCCCGGCCTCAGTGAGCGAGCGAGCGCGCAGAGAGGGAGTGTAGCCATGCTCTAGGAAGA |
| | | TCAATTCAATTCACGCGTCGACATTGATTATTGACTAGTTATTAATAGTAATCAATTACGGG |
| | | GTCATTAGTTCATAGCCCATATATGGAGTTCCGCGTTACATAACTTACGGTAAATGGCCCGC |
| | | CTGGCTGACCGCCCAACGACCCCCGCCCATTGACGTCAATAATGACGTATGTTCCCATAGTA |
| | | ACGCCAATAGGGACTTTCCATTGACGTCAATGGGTGGAGTATTTACGGTAAACTGCCCACTT |
| | | GGCAGTACATCAAGTGTATCATATGCCAAGTACGCCCCCTATTGACGTCAATGACGGTAAAT |
| | | GGCCCGCCTGGCATTATGCCCAGTACATGACCTTATGGGACTTTCCTACTTGGCAGTACATC |
| | | TACGTATTAGTCATCGCTATTACCATGTCGAGGCCACGTTCTGCTTCACTCTCCCCATCTCC |
| | | CCCCCCTCCCCACCCCCAATTTTGTATTTATTTATTTTTTAATTATTTTGTGCAGCGATGGG |
| | | GGCGGGGGGGGGGGGCGCGCGCCAGGCGGGGCGGGGCGGGGCGAGGGGCGGGGCGGGGCGAG |
| | | GCGGAGAGGTGCGGCGGCAGCCAATCAGAGCGGCGCGCTCCGAAAGTTTCCTTTTATGGCGA |
| | | GGCGGCGGCGGCGGCGGCCCTATAAAAAGCGAAGCGCGCGGGGGGCGGGAGCAAGCTTCGTT |
| | | TAGTGAACCGTCAGATCGCCTGGAGACGCCATCCACGCTGTTTTGACCTCCATAGAAGACAC |
| | | CGGGACCGATCCAGCCTCCGCGGATTCGAATCCCGGCCGGGAACGGTGCATTGGAACGCGGA |
| | | TTCCCCGTGCCAAGAGTGACGTAAGTACCGCCTATAGAGTCTATAGGCCCACAAAAAATGCT |
| | | TTCTTCTTTTAATATACTTTTTTGTTTATCTTATTTCTAATACTTTCCCTAATCTCTTTCTT |
| | | TCAGGGCAATAATGATACAATGTATCATGCCTCTTTGCACCATTCTAAAGAATAACAGTGAT |
| | | AATTTCTGGGTTAAGGCAATAGCAATATTTCTGCATATAAATATTTCTGCATATAAATTGTA |
| | | ACTGATGTAAGAGGTTTCATATTGCTAATAGCAGCTACAATCCAGCTACCATTCTGCTTTTA |
| | | TTTTATGGTTGGGATAAGGCTGGATTATTCTGAGTCCAAGCTAGGCCCTTTTGCTAATCATG |
| | | TTCATACCTCTTATCTTCCTCCCACAGCTCCTGGGCAACGTGCTGGTCTGTGTGCTGGCCCA |
| | | TCACTTTGGCAAAGAATTGGGATTCGAACCGGTGAAGCAAAGAAGGGGCAGAGGGAGCCCGT |
| | | GAGCTGAGTGGGCCAGGGACTGGGAGAAGGAGTGAGGAGGCAGGGCCGGCATGCCTCTGCTG |
| | | CTGGCCAGAGGCTTTGGCTCGGGACTTTCTGTCTGCACCTGTCACTAGTAAGTCCCGAGCCA |
| | | AAGCCTTTGGCCGTGTAGTGCTACCCAGCGCTGGCTGCCTCCTCAGCATTGCAATTCCTCTC |
| | | CCATCTGGGCACCAGTCAGCTACCCTGGTGGGAATCTGGGTAGCCCTCGAGGGGTGGCATCC |
| | | CTGTGACCCCTCCCCAGTGCCTCTCCTGGCCCTGGAAGTTGCCACTCCAGTGCCCACCAGCC |
| | | TTGTCCTAATAAAATTAAGTTGCATCATTTTGTCTGACTAGGTGTCCTTCTATAATATTATG |
| | | GGGTGGAGGGGGGTGGTATGGAGCAAGGGGCAAGTTGGGAAGACAACCTGTAGGGCCTGCGG |
| | | GGTCTATTGGGAACCAAGCTGGAGTGCAGTGGCACAATCTTGGCTCACTGCAATCTCCGCCT |
| | | CCTGGGTTCAAGCGATTCTCCTGCCTCAGCCTCCCGAGTTGTTGGGATTCCAGGCATGCATG |
| | | ACCAGGCTCAGCTAATTTTTGTTTTTTTGGTAGAGACGGGGTTTCACCATATTGGCCAGGCT |
| | | GGTCTCCAACTCCTAATCTCAGGTGATCTACCCACCTTGGCCTCCCAAATTGCTGGGATTAC |
| | | AGGCGTGAACCACTGCTCCCTTCCCTGTCCTTATCGATGCCTAGGGTTAATCATTAACTACA |
| | | AGGAACCCCTAGTGATGGAGTTGGCCACTCCCTCTCTGCGCGCTCGCTCGCTCACTGAGGCC |
| | | GGGCGACCAAAGGTCGCCCGACGCCCGGGCTTTGCCCGGGCGGCCTCAGTGAGCGAGCGAGC |
| | | GCGCAG |
| VOYTAU31 | 5149 | CTGCGCGCTCGCTCGCTCACTGAGGCCGCCCGGGCAAAGCCCGGGCGTCGGGCGACCTTTGG |
| | | TCGCCCGGCCTCAGTGAGCGAGCGAGCGCGCAGAGAGGGAGTGTAGCCATGCTCTAGGAAGA |
| | | TCAATTCAATTCACGCGTCGACATTGATTATTGACTAGTTATTAATAGTAATCAATTACGGG |
| | | GTCATTAGTTCATAGCCCATATATGGAGTTCCGCGTTACATAACTTACGGTAAATGGCCCGC |
| | | CTGGCTGACCGCCCAACGACCCCCGCCCATTGACGTCAATAATGACGTATGTTCCCATAGTA |
| | | ACGCCAATAGGGACTTTCCATTGACGTCAATGGGTGGAGTATTTACGGTAAACTGCCCACTT |
| | | GGCAGTACATCAAGTGTATCATATGCCAAGTACGCCCCCTATTGACGTCAATGACGGTAAAT |
| | | GGCCCGCCTGGCATTATGCCCAGTACATGACCTTATGGGACTTTCCTACTTGGCAGTACATC |
| | | TACGTATTAGTCATCGCTATTACCATGTCGAGGCCACGTTCTGCTTCACTCTCCCCATCTCC |
| | | CCCCCCTCCCCACCCCCAATTTTGTATTTATTTATTTTTTAATTATTTTGTGCAGCGATGGG |
| | | GGCGGGGGGGGGGGGCGCGCGCCAGGCGGGGCGGGGCGGGGCGAGGGGCGGGGCGGGGCGAG |
| | | GCGGAGAGGTGCGGCGGCAGCCAATCAGAGCGGCGCGCTCCGAAAGTTTCCTTTTATGGCGA |
| | | GGCGGCGGCGGCGGCGGCCCTATAAAAAGCGAAGCGCGCGGCGGGCGGGAGCAAGCTTCGTT |
| | | TAGTGAACCGTCAGATCGCCTGGAGACGCCATCCACGCTGTTTTGACCTCCATAGAAGACAC |
| | | CGGGACCGATCCAGCCTCCGCGGATTCGAATCCCGGCCGGGAACGGTGCATTGGAACGCGGA |
| | | TTCCCCGTGCCAAGAGTGACGTAAGTACCGCCTATAGAGTCTATAGGCCCACAAAAAATGCT |
| | | TTCTTCTTTTAATATACTTTTTTGTTTATCTTATTTCTAATACTTTCCCTAATCTCTTTCTT |
| | | TCAGGGCAATAATGATACAATGTATCATGCCTCTTTGCACCATTCTAAAGAATAACAGTGAT |
| | | AATTTCTGGGTTAAGGCAATAGCAATATTTCTGCATATAAATATTTCTGCATATAAATTGTA |
| | | ACTGATGTAAGAGGTTTCATATTGCTAATAGCAGCTACAATCCAGCTACCATTCTGCTTTTA |
| | | TTTTATGGTTGGGATAAGGCTGGATTATTCTGAGTCCAAGCTAGGCCCTTTTGCTAATCATG |
| | | TTCATACCTCTTATCTTCCTCCCACAGCTCCTGGGCAACGTGCTGGTCTGTGTGCTGGCCCA |
| | | TCACTTTGGCAAAGAATTGGGATTCGAACCGGTGAAGCAAAGAAGGGGCAGAGGGAGCCCGT |
| | | GAGCTGAGTGGGCCAGGGACTGGGAGAAGGAGTGAGGAGGCAGGGCCGGCATGCCTCTGCTG |
| | | CTGGCCAGACCTCGCAGTTCGGTTAATTCTGTCTGCACCTGTCACTAGTATTAACCGAACTG |
| | | CGAGGTTTGGCCGTGTAGTGCTACCCAGCGCTGGCTGCCTCCTCAGCATTGCAATTCCTCTC |
| | | CCATCTGGGCACCAGTCAGCTACCCTGGTGGGAATCTGGGTAGCCCTCGAGGGGTGGCATCC |
| | | CTGTGACCCCTCCCCAGTGCCTCTCCTGGCCCTGGAAGTTGCCACTCCAGTGCCCACCAGCC |
| | | TTGTCCTAATAAAATTAAGTTGCATCATTTTGTCTGACTAGGTGTCCTTCTATAATATTATG |
| | | GGGTGGAGGGGGGTGGTATGGAGCAAGGGGCAAGTTGGGAAGACAACCTGTAGGGCCTGCGG |
| | | GGTCTATTGGGAACCAAGCTGGAGTGCAGTGGCACAATCTTGGCTCACTGCAATCTCCGCCT |
| | | CCTGGGTTCAAGCGATTCTCCTGCCTCAGCCTCCCGAGTTGTTGGGATTCCAGGCATGCATG |
| | | ACCAGGCTCAGCTAATTTTTGTTTTTTTGGTAGAGACGGGGTTTCACCATATTGGCCAGGCT |
| | | GGTCTCCAACTCCTAATCTCAGGTGATCTACCCACCTTGGCCTCCCAAATTGCTGGGATTAC |
| | | AGGCGTGAACCACTGCTCCCTTCCCTGTCCTTATCGATGCCTAGGGTTAATCATTAACTACA |
| | | AGGAACCCCTAGTGATGGAGTTGGCCACTCCCTCTCTGCGCGCTCGCTCGCTCACTGAGGCC |
| | | GGGCGACCAAAGGTCGCCCGACGCCCGGGCTTTGCCCGGGCGGCCTCAGTGAGCGAGCGAGC |
| | | GCGCAG |
| VOYTAU32 | 5150 | CTGCGCGCTCGCTCGCTCACTGAGGCCGCCCGGGCAAAGCCCGGGCGTCGGGCGACCTTTGG |
| | | TCGCCCGGCCTCAGTGAGCGAGCGAGCGCGCAGAGAGGGAGTGTAGCCATGCTCTAGGAAGA |
| | | TCAATTCAATTCACGCGTCGACATTGATTATTGACTAGTTATTAATAGTAATCAATTACGGG |
| | | GTCATTAGTTCATAGCCCATATATGGAGTTCCGCGTTACATAACTTACGGTAAATGGCCCGC |
| | | CTGGCTGACCGCCCAACGACCCCCGCCCATTGACGTCAATAATGACGTATGTTCCCATAGTA |
| | | ACGCCAATAGGGACTTTCCATTGACGTCAATGGGTGGAGTATTTACGGTAAACTGCCCACTT |
| | | GGCAGTACATCAAGTGTATCATATGCCAAGTACGCCCCCTATTGACGTCAATGACGGTAAAT |
| | | GGCCCGCCTGGCATTATGCCCAGTACATGACCTTATGGGACTTTCCTACTTGGCAGTACATC |
| | | TACGTATTAGTCATCGCTATTACCATGTCGAGGCCACGTTCTGCTTCACTCTCCCCATCTCC |
| | | CCCCCCTCCCCACCCCCAATTTTGTATTTATTTATTTTTTAATTATTTTGTGCAGCGATGGG |
| | | GGCGGGGGGGGGGGGCGCGCGCCAGGCGGGGCGGGGCGGGGCGAGGGGGGGGGGGGGCGAG |
| | | GCGGAGAGGTGCGGCGGCAGCCAATCAGAGCGGCGCGCTCCGAAAGTTTCCTTTTATGGCGA |
| | | GGCGGCGGCGGCGGCGGCCCTATAAAAAGCGAAGCGCGCGGCGGGCGGGAGCAAGCTTCGTT |
| | | TAGTGAACCGTCAGATCGCCTGGAGACGCCATCCACGCTGTTTTGACCTCCATAGAAGACAC |
| | | CGGGACCGATCCAGCCTCCGCGGATTCGAATCCCGGCCGGGAACGGTGCATTGGAACGCGGA |
| | | TTCCCCGTGCCAAGAGTGACGTAAGTACCGCCTATAGAGTCTATAGGCCCACAAAAAATGCT |
| | | TTCTTCTTTTAATATACTTTTTTGTTTATCTTATTTCTAATACTTTCCCTAATCTCTTTCTT |
| | | TCAGGGCAATAATGATACAATGTATCATGCCTCTTTGCACCATTCTAAAGAATAACAGTGAT |
| | | AATTTCTGGGTTAAGGCAATAGCAATATTTCTGCATATAAATATTTCTGCATATAAATTGTA |
| | | ACTGATGTAAGAGGTTTCATATTGCTAATAGCAGCTACAATCCAGCTACCATTCTGCTTTTA |
| | | TTTTATGGTTGGGATAAGGCTGGATTATTCTGAGTCCAAGCTAGGCCCTTTTGCTAATCATG |
| | | TTCATACCTCTTATCTTCCTCCCACAGCTCCTGGGCAACGTGCTGGTCTGTGTGCTGGCCCA |
| | | TCACTTTGGCAAAGAATTGGGATTCGAACCGGTGAAGCAAAGAAGGGGCAGAGGGAGCCCGT |
| | | GAGCTGAGTGGGCCAGGGACTGGGAGAAGGAGTGAGGAGGCAGGGCCGGCATGCCTCTGCTG |
| | | CTGGCCAGAGCTTTGGCTCGGGACTTCTCTGTCTGCACCTGTCACTAGTGAAGTCCCGAGCC |
| | | AAAGCTTTGGCCGTGTAGTGCTACCCAGCGCTGGCTGCCTCCTCAGCATTGCAATTCCTCTC |
| | | CCATCTGGGCACCAGTCAGCTACCCTGGTGGGAATCTGGGTAGCCCTCGAGGGGTGGCATCC |
| | | CTGTGACCCCTCCCCAGTGCCTCTCCTGGCCCTGGAAGTTGCCACTCCAGTGCCCACCAGCC |
| | | TTGTCCTAATAAAATTAAGTTGCATCATTTTGTCTGACTAGGTGTCCTTCTATAATATTATG |
| | | GGGTGGAGGGGGGTGGTATGGAGCAAGGGGCAAGTTGGGAAGACAACCTGTAGGGCCTGCGG |
| | | GGTCTATTGGGAACCAAGCTGGAGTGCAGTGGCACAATCTTGGCTCACTGCAATCTCCGCCT |
| | | CCTGGGTTCAAGCGATTCTCCTGCCTCAGCCTCCCGAGTTGTTGGGATTCCAGGCATGCATG |
| | | ACCAGGCTCAGCTAATTTTTGTTTTTTTGGTAGAGACGGGGTTTCACCATATTGGCCAGGCT |
| | | GGTCTCCAACTCCTAATCTCAGGTGATCTACCCACCTTGGCCTCCCAAATTGCTGGGATTAC |
| | | AGGCGTGAACCACTGCTCCCTTCCCTGTCCTTATCGATGCCTAGGGTTAATCATTAACTACA |
| | | AGGAACCCCTAGTGATGGAGTTGGCCACTCCCTCTCTGCGCGCTCGCTCGCTCACTGAGGCC |
| | | GGGCGACCAAAGGTCGCCCGACGCCCGGGCTTTGCCCGGGCGGCCTCAGTGAGCGAGCGAGC |
| | | GCGCAG |
| VOYTAU33 | 5151 | CTGCGCGCTCGCTCGCTCACTGAGGCCGCCCGGGCAAAGCCCGGGCGTCGGGCGACCTTTGG |
| | | TCGCCCGGCCTCAGTGAGCGAGCGAGCGCGCAGAGAGGGAGTGTAGCCATGCTCTAGGAAGA |
| | | TCAATTCAATTCACGCGTCGACATTGATTATTGACTAGTTATTAATAGTAATCAATTACGGG |
| | | GTCATTAGTTCATAGCCCATATATGGAGTTCCGCGTTACATAACTTACGGTAAATGGCCCGC |
| | | CTGGCTGACCGCCCAACGACCCCCGCCCATTGACGTCAATAATGACGTATGTTCCCATAGTA |
| | | ACGCCAATAGGGACTTTCCATTGACGTCAATGGGTGGAGTATTTACGGTAAACTGCCCACTT |
| | | GGCAGTACATCAAGTGTATCATATGCCAAGTACGCCCCCTATTGACGTCAATGACGGTAAAT |
| | | GGCCCGCCTGGCATTATGCCCAGTACATGACCTTATGGGACTTTCCTACTTGGCAGTACATC |
| | | TACGTATTAGTCATCGCTATTACCATGTCGAGGCCACGTTCTGCTTCACTCTCCCCATCTCC |
| | | CCCCCCTCCCCACCCCCAATTTTGTATTTATTTATTTTTTAATTATTTTGTGCAGCGATGGG |
| | | GGCGGGGGGGGGGGGCGCGCGCCAGGCGGGGCGGGGCGGGGCGAGGGGCGGGGCGGGGCGAG |
| | | GCGGAGAGGTGCGGCGGCAGCCAATCAGAGCGGCGCGCTCCGAAAGTTTCCTTTTATGGCGA |
| | | GGCGGCGGCGGCGGCGGCCCTATAAAAAGCGAAGCGCGCGGCGGGCGGGAGCAAGCTTCGTT |
| | | TAGTGAACCGTCAGATCGCCTGGAGACGCCATCCACGCTGTTTTGACCTCCATAGAAGACAC |
| | | CGGGACCGATCCAGCCTCCGCGGATTCGAATCCCGGCCGGGAACGGTGCATTGGAACGCGGA |
| | | TTCCCCGTGCCAAGAGTGACGTAAGTACCGCCTATAGAGTCTATAGGCCCACAAAAAATGCT |
| | | TTCTTCTTTTAATATACTTTTTTGTTTATCTTATTTCTAATACTTTCCCTAATCTCTTTCTT |
| | | TCAGGGCAATAATGATACAATGTATCATGCCTCTTTGCACCATTCTAAAGAATAACAGTGAT |
| | | AATTTCTGGGTTAAGGCAATAGCAATATTTCTGCATATAAATATTTCTGCATATAAATTGTA |
| | | ACTGATGTAAGAGGTTTCATATTGCTAATAGCAGCTACAATCCAGCTACCATTCTGCTTTTA |
| | | TTTTATGGTTGGGATAAGGCTGGATTATTCTGAGTCCAAGCTAGGCCCTTTTGCTAATCATG |
| | | TTCATACCTCTTATCTTCCTCCCACAGCTCCTGGGCAACGTGCTGGTCTGTGTGCTGGCCCA |
| | | TCACTTTGGCAAAGAATTGGGATTCGAACCGGTGAAGCAAAGAAGGGGCAGAGGGAGCCCGT |
| | | GAGCTGAGTGGGCCAGGGACTGGGAGAAGGAGTGAGGAGGCAGGGCCGGCATGCCTCTGCTG |
| | | CTGGCCAGAAGCTGACCTTCCGCGAGATCTGTCTGCACCTGTCACTAGTTCTCGCGGAAGGT |
| | | CAGCTTTTGGCCGTGTAGTGCTACCCAGCGCTGGCTGCCTCCTCAGCATTGCAATTCCTCTC |
| | | CCATCTGGGCACCAGTCAGCTACCCTGGTGGGAATCTGGGTAGCCCTCGAGGGGTGGCATCC |
| | | CTGTGACCCCTCCCCAGTGCCTCTCCTGGCCCTGGAAGTTGCCACTCCAGTGCCCACCAGCC |
| | | TTGTCCTAATAAAATTAAGTTGCATCATTTTGTCTGACTAGGTGTCCTTCTATAATATTATG |
| | | GGGTGGAGGGGGGTGGTATGGAGCAAGGGGCAAGTTGGGAAGACAACCTGTAGGGCCTGCGG |
| | | GGTCTATTGGGAACCAAGCTGGAGTGCAGTGGCACAATCTTGGCTCACTGCAATCTCCGCCT |
| | | CCTGGGTTCAAGCGATTCTCCTGCCTCAGCCTCCCGAGTTGTTGGGATTCCAGGCATGCATG |
| | | ACCAGGCTCAGCTAATTTTTGTTTTTTTGGTAGAGACGGGGTTTCACCATATTGGCCAGGCT |
| | | GGTCTCCAACTCCTAATCTCAGGTGATCTACCCACCTTGGCCTCCCAAATTGCTGGGATTAC |
| | | AGGCGTGAACCACTGCTCCCTTCCCTGTCCTTATCGATGCCTAGGGTTAATCATTAACTACA |
| | | AGGAACCCCTAGTGATGGAGTTGGCCACTCCCTCTCTGCGCGCTCGCTCGCTCACTGAGGCC |
| | | GGGCGACCAAAGGTCGCCCGACGCCCGGGCTTTGCCCGGGCGGCCTCAGTGAGCGAGCGAGC |
| | | GCGCAG |
| VOYTAU34 | 5152 | CTGCGCGCTCGCTCGCTCACTGAGGCCGCCCGGGCAAAGCCCGGGCGTCGGGCGACCTTTGG |
| | | TCGCCCGGCCTCAGTGAGCGAGCGAGCGCGCAGAGAGGGAGTGTAGCCATGCTCTAGGAAGA |
| | | TCAATTCAATTCACGCGTCGACATTGATTATTGACTAGTTATTAATAGTAATCAATTACGGG |
| | | GTCATTAGTTCATAGCCCATATATGGAGTTCCGCGTTACATAACTTACGGTAAATGGCCCGC |
| | | CTGGCTGACCGCCCAACGACCCCCGCCCATTGACGTCAATAATGACGTATGTTCCCATAGTA |
| | | ACGCCAATAGGGACTTTCCATTGACGTCAATGGGTGGAGTATTTACGGTAAACTGCCCACTT |
| | | GGCAGTACATCAAGTGTATCATATGCCAAGTACGCCCCCTATTGACGTCAATGACGGTAAAT |
| | | GGCCCGCCTGGCATTATGCCCAGTACATGACCTTATGGGACTTTCCTACTTGGCAGTACATC |
| | | TACGTATTAGTCATCGCTATTACCATGTCGAGGCCACGTTCTGCTTCACTCTCCCCATCTCC |
| | | CCCCCCTCCCCACCCCCAATTTTGTATTTATTTATTTTTTAATTATTTTGTGCAGCGATGGG |
| | | GGCGGGGGGGGGGGGCGCGCGCCAGGCGGGGCGGGGCGGGGCGAGGGGCGGGGGGGGGCGAG |
| | | GCGGAGAGGTGCGGCGGCAGCCAATCAGAGCGGCGCGCTCCGAAAGTTTCCTTTTATGGCGA |
| | | GGCGGCGGCGGCGGCGGCCCTATAAAAAGCGAAGCGCGCGGCGGGCGGGAGCAAGCTTCGTT |
| | | TAGTGAACCGTCAGATCGCCTGGAGACGCCATCCACGCTGTTTTGACCTCCATAGAAGACAC |
| | | CGGGACCGATCCAGCCTCCGCGGATTCGAATCCCGGCCGGGAACGGTGCATTGGAACGCGGA |
| | | TTCCCCGTGCCAAGAGTGACGTAAGTACCGCCTATAGAGTCTATAGGCCCACAAAAAATGCT |
| | | TTCTTCTTTTAATATACTTTTTTGTTTATCTTATTTCTAATACTTTCCCTAATCTCTTTCTT |
| | | TCAGGGCAATAATGATACAATGTATCATGCCTCTTTGCACCATTCTAAAGAATAACAGTGAT |
| | | AATTTCTGGGTTAAGGCAATAGCAATATTTCTGCATATAAATATTTCTGCATATAAATTGTA |
| | | ACTGATGTAAGAGGTTTCATATTGCTAATAGCAGCTACAATCCAGCTACCATTCTGCTTTTA |
| | | TTTTATGGTTGGGATAAGGCTGGATTATTCTGAGTCCAAGCTAGGCCCTTTTGCTAATCATG |
| | | TTCATACCTCTTATCTTCCTCCCACAGCTCCTGGGCAACGTGCTGGTCTGTGTGCTGGCCCA |
| | | TCACTTTGGCAAAGAATTGGGATTCGAACCGGTGAAGCAAAGAAGGGGCAGAGGGAGCCCGT |
| | | GAGCTGAGTGGGCCAGGGACTGGGAGAAGGAGTGAGGAGGCAGGGCCGGCATGCCTCTGCTG |
| | | CTGGCCAGAGCCGTCTTCCGCCAAGAGTCTGTCTGCACCTGTCACTAGTCTCTTGGCGGAAG |
| | | ACGGCTTTGGCCGTGTAGTGCTACCCAGCGCTGGCTGCCTCCTCAGCATTGCAATTCCTCTC |
| | | CCATCTGGGCACCAGTCAGCTACCCTGGTGGGAATCTGGGTAGCCCTCGAGGGGTGGCATCC |
| | | CTGTGACCCCTCCCCAGTGCCTCTCCTGGCCCTGGAAGTTGCCACTCCAGTGCCCACCAGCC |
| | | TTGTCCTAATAAAATTAAGTTGCATCATTTTGTCTGACTAGGTGTCCTTCTATAATATTATG |
| | | GGGTGGAGGGGGGTGGTATGGAGCAAGGGGCAAGTTGGGAAGACAACCTGTAGGGCCTGCGG |
| | | GGTCTATTGGGAACCAAGCTGGAGTGCAGTGGCACAATCTTGGCTCACTGCAATCTCCGCCT |
| | | CCTGGGTTCAAGCGATTCTCCTGCCTCAGCCTCCCGAGTTGTTGGGATTCCAGGCATGCATG |
| | | ACCAGGCTCAGCTAATTTTTGTTTTTTTGGTAGAGACGGGGTTTCACCATATTGGCCAGGCT |
| | | GGTCTCCAACTCCTAATCTCAGGTGATCTACCCACCTTGGCCTCCCAAATTGCTGGGATTAC |
| | | AGGCGTGAACCACTGCTCCCTTCCCTGTCCTTATCGATGCCTAGGGTTAATCATTAACTACA |
| | | AGGAACCCCTAGTGATGGAGTTGGCCACTCCCTCTCTGCGCGCTCGCTCGCTCACTGAGGCC |
| | | GGGCGACCAAAGGTCGCCCGACGCCCGGGCTTTGCCCGGGCGGCCTCAGTGAGCGAGCGAGC |
| | | GCGCAG |
| VOYTAU35 | 5153 | CTGCGCGCTCGCTCGCTCACTGAGGCCGCCCGGGCAAAGCCCGGGCGTCGGGCGACCTTTGG |
| | | TCGCCCGGCCTCAGTGAGCGAGCGAGCGCGCAGAGAGGGAGTGTAGCCATGCTCTAGGAAGA |
| | | TCAATTCAATTCACGCGTCGACATTGATTATTGACTAGTTATTAATAGTAATCAATTACGGG |
| | | GTCATTAGTTCATAGCCCATATATGGAGTTCCGCGTTACATAACTTACGGTAAATGGCCCGC |
| | | CTGGCTGACCGCCCAACGACCCCCGCCCATTGACGTCAATAATGACGTATGTTCCCATAGTA |
| | | ACGCCAATAGGGACTTTCCATTGACGTCAATGGGTGGAGTATTTACGGTAAACTGCCCACTT |
| | | GGCAGTACATCAAGTGTATCATATGCCAAGTACGCCCCCTATTGACGTCAATGACGGTAAAT |
| | | GGCCCGCCTGGCATTATGCCCAGTACATGACCTTATGGGACTTTCCTACTTGGCAGTACATC |
| | | TACGTATTAGTCATCGCTATTACCATGTCGAGGCCACGTTCTGCTTCACTCTCCCCATCTCC |
| | | CCCCCCTCCCCACCCCCAATTTTGTATTTATTTATTTTTTAATTATTTTGTGCAGCGATGGG |
| | | GGCGGGGGGGGGGGGCGCGCGCCAGGCGGGGGGGGGGGGGGCGAGGGGGGGGGGGGGGCGAG |
| | | GCGGAGAGGTGCGGCGGCAGCCAATCAGAGCGGCGCGCTCCGAAAGTTTCCTTTTATGGCGA |
| | | GGCGGCGGCGGCGGCGGCCCTATAAAAAGCGAAGCGCGCGGCGGGCGGGAGCAAGCTTCGTT |
| | | TAGTGAACCGTCAGATCGCCTGGAGACGCCATCCACGCTGTTTTGACCTCCATAGAAGACAC |
| | | CGGGACCGATCCAGCCTCCGCGGATTCGAATCCCGGCCGGGAACGGTGCATTGGAACGCGGA |
| | | TTCCCCGTGCCAAGAGTGACGTAAGTACCGCCTATAGAGTCTATAGGCCCACAAAAAATGCT |
| | | TTCTTCTTTTAATATACTTTTTTGTTTATCTTATTTCTAATACTTTCCCTAATCTCTTTCTT |
| | | TCAGGGCAATAATGATACAATGTATCATGCCTCTTTGCACCATTCTAAAGAATAACAGTGAT |
| | | AATTTCTGGGTTAAGGCAATAGCAATATTTCTGCATATAAATATTTCTGCATATAAATTGTA |
| | | ACTGATGTAAGAGGTTTCATATTGCTAATAGCAGCTACAATCCAGCTACCATTCTGCTTTTA |
| | | TTTTATGGTTGGGATAAGGCTGGATTATTCTGAGTCCAAGCTAGGCCCTTTTGCTAATCATG |
| | | TTCATACCTCTTATCTTCCTCCCACAGCTCCTGGGCAACGTGCTGGTCTGTGTGCTGGCCCA |
| | | TCACTTTGGCAAAGAATTGGGATTCGAACCGGTGTGCTGGGCGGGGGGCGGCGGGCCCTCCC |
| | | GCAGAACACCATGCGCTCTTCGGAACCTCGCAGTTCGGTTAATGCCTGTGACCTGGTATTAA |
| | | CCGAACTGCGAGGTTCTGTGGAGCGCCTTGACAGCAGCCATGGGAGGGCCGCCCCCTACCTC |
| | | AGTGACTCGAGGGGTGGCATCCCTGTGACCCCTCCCCAGTGCCTCTCCTGGCCCTGGAAGTT |
| | | GCCACTCCAGTGCCCACCAGCCTTGTCCTAATAAAATTAAGTTGCATCATTTTGTCTGACTA |
| | | GGTGTCCTTCTATAATATTATGGGGTGGAGGGGGGTGGTATGGAGCAAGGGGCAAGTTGGGA |
| | | AGACAACCTGTAGGGCCTGCGGGGTCTATTGGGAACCAAGCTGGAGTGCAGTGGCACAATCT |
| | | TGGCTCACTGCAATCTCCGCCTCCTGGGTTCAAGCGATTCTCCTGCCTCAGCCTCCCGAGTT |
| | | GTTGGGATTCCAGGCATGCATGACCAGGCTCAGCTAATTTTTGTTTTTTTGGTAGAGACGGG |
| | | GTTTCACCATATTGGCCAGGCTGGTCTCCAACTCCTAATCTCAGGTGATCTACCCACCTTGG |
| | | CCTCCCAAATTGCTGGGATTACAGGCGTGAACCACTGCTCCCTTCCCTGTCCTTATCGATGC |
| | | CTAGGGTTAATCATTAACTACAAGGAACCCCTAGTGATGGAGTTGGCCACTCCCTCTCTGCG |
| | | CGCTCGCTCGCTCACTGAGGCCGGGCGACCAAAGGTCGCCCGACGCCCGGGCTTTGCCCGGG |
| | | CGGCCTCAGTGAGCGAGCGAGCGCGCAG |
| VOYTAU36 | 5154 | CTGCGCGCTCGCTCGCTCACTGAGGCCGCCCGGGCAAAGCCCGGGCGTCGGGCGACCTTTGG |
| | | TCGCCCGGCCTCAGTGAGCGAGCGAGCGCGCAGAGAGGGAGTGTAGCCATGCTCTAGGAAGA |
| | | TCAATTCAATTCACGCGTCGACATTGATTATTGACTAGTTATTAATAGTAATCAATTACGGG |
| | | GTCATTAGTTCATAGCCCATATATGGAGTTCCGCGTTACATAACTTACGGTAAATGGCCCGC |
| | | CTGGCTGACCGCCCAACGACCCCCGCCCATTGACGTCAATAATGACGTATGTTCCCATAGTA |
| | | ACGCCAATAGGGACTTTCCATTGACGTCAATGGGTGGAGTATTTACGGTAAACTGCCCACTT |
| | | GGCAGTACATCAAGTGTATCATATGCCAAGTACGCCCCCTATTGACGTCAATGACGGTAAAT |
| | | GGCCCGCCTGGCATTATGCCCAGTACATGACCTTATGGGACTTTCCTACTTGGCAGTACATC |
| | | TACGTATTAGTCATCGCTATTACCATGTCGAGGCCACGTTCTGCTTCACTCTCCCCATCTCC |
| | | CCCCCCTCCCCACCCCCAATTTTGTATTTATTTATTTTTTAATTATTTTGTGCAGCGATGGG |
| | | GGCGGGGGGGGGGGGCGCGCGCCAGGCGGGGGGGGGCGGGGCGAGGGGCGGGGCGGGGCGAG |
| | | GCGGAGAGGTGCGGCGGCAGCCAATCAGAGCGGCGCGCTCCGAAAGTTTCCTTTTATGGCGA |
| | | GGCGGCGGCGGCGGCGGCCCTATAAAAAGCGAAGCGCGCGGCGGGCGGGAGCAAGCTTCGTT |
| | | TAGTGAACCGTCAGATCGCCTGGAGACGCCATCCACGCTGTTTTGACCTCCATAGAAGACAC |
| | | CGGGACCGATCCAGCCTCCGCGGATTCGAATCCCGGCCGGGAACGGTGCATTGGAACGCGGA |
| | | TTCCCCGTGCCAAGAGTGACGTAAGTACCGCCTATAGAGTCTATAGGCCCACAAAAAATGCT |
| | | TTCTTCTTTTAATATACTTTTTTGTTTATCTTATTTCTAATACTTTCCCTAATCTCTTTCTT |
| | | TCAGGGCAATAATGATACAATGTATCATGCCTCTTTGCACCATTCTAAAGAATAACAGTGAT |
| | | AATTTCTGGGTTAAGGCAATAGCAATATTTCTGCATATAAATATTTCTGCATATAAATTGTA |
| | | ACTGATGTAAGAGGTTTCATATTGCTAATAGCAGCTACAATCCAGCTACCATTCTGCTTTTA |
| | | TTTTATGGTTGGGATAAGGCTGGATTATTCTGAGTCCAAGCTAGGCCCTTTTGCTAATCATG |
| | | TTCATACCTCTTATCTTCCTCCCACAGCTCCTGGGCAACGTGCTGGTCTGTGTGCTGGCCCA |
| | | TCACTTTGGCAAAGAATTGGGATTCGAACCGGTGTGCTGGGCGGGGGGCGGCGGGCCCTCCC |
| | | GCAGAACACCATGCGCTCTTCGGAAGCTTTGGCTCGGGACTTCGCCTGTGACCTGGTGAAGT |
| | | CCCGAGCCAAAGCTTCTGTGGAGCGCCTTGACAGCAGCCATGGGAGGGCCGCCCCCTACCTC |
| | | AGTGACTCGAGGGGTGGCATCCCTGTGACCCCTCCCCAGTGCCTCTCCTGGCCCTGGAAGTT |
| | | GCCACTCCAGTGCCCACCAGCCTTGTCCTAATAAAATTAAGTTGCATCATTTTGTCTGACTA |
| | | GGTGTCCTTCTATAATATTATGGGGTGGAGGGGGGTGGTATGGAGCAAGGGGCAAGTTGGGA |
| | | AGACAACCTGTAGGGCCTGCGGGGTCTATTGGGAACCAAGCTGGAGTGCAGTGGCACAATCT |
| | | TGGCTCACTGCAATCTCCGCCTCCTGGGTTCAAGCGATTCTCCTGCCTCAGCCTCCCGAGTT |
| | | GTTGGGATTCCAGGCATGCATGACCAGGCTCAGCTAATTTTTGTTTTTTTGGTAGAGACGGG |
| | | GTTTCACCATATTGGCCAGGCTGGTCTCCAACTCCTAATCTCAGGTGATCTACCCACCTTGG |
| | | CCTCCCAAATTGCTGGGATTACAGGCGTGAACCACTGCTCCCTTCCCTGTCCTTATCGATGC |
| | | CTAGGGTTAATCATTAACTACAAGGAACCCCTAGTGATGGAGTTGGCCACTCCCTCTCTGCG |
| | | CGCTCGCTCGCTCACTGAGGCCGGGCGACCAAAGGTCGCCCGACGCCCGGGCTTTGCCCGGG |
| | | CGGCCTCAGTGAGCGAGCGAGCGCGCAG |
| VOYTAU37 | 5155 | CTGCGCGCTCGCTCGCTCACTGAGGCCGCCCGGGCAAAGCCCGGGCGTCGGGCGACCTTTGG |
| | | TCGCCCGGCCTCAGTGAGCGAGCGAGCGCGCAGAGAGGGAGTGTAGCCATGCTCTAGGAAGA |
| | | TCAATTCAATTCACGCGTCGACATTGATTATTGACTAGTTATTAATAGTAATCAATTACGGG |
| | | GTCATTAGTTCATAGCCCATATATGGAGTTCCGCGTTACATAACTTACGGTAAATGGCCCGC |
| | | CTGGCTGACCGCCCAACGACCCCCGCCCATTGACGTCAATAATGACGTATGTTCCCATAGTA |
| | | ACGCCAATAGGGACTTTCCATTGACGTCAATGGGTGGAGTATTTACGGTAAACTGCCCACTT |
| | | GGCAGTACATCAAGTGTATCATATGCCAAGTACGCCCCCTATTGACGTCAATGACGGTAAAT |
| | | GGCCCGCCTGGCATTATGCCCAGTACATGACCTTATGGGACTTTCCTACTTGGCAGTACATC |
| | | TACGTATTAGTCATCGCTATTACCATGTCGAGGCCACGTTCTGCTTCACTCTCCCCATCTCC |
| | | CCCCCCTCCCCACCCCCAATTTTGTATTTATTTATTTTTTAATTATTTTGTGCAGCGATGGG |
| | | GGCGGGGGGGGGGGGCGCGCGCCAGGCGGGGCGGGGCGGGGCGAGGGGCGGGGCGGGGCGAG |
| | | GCGGAGAGGTGCGGCGGCAGCCAATCAGAGCGGCGCGCTCCGAAAGTTTCCTTTTATGGCGA |
| | | GGCGGCGGCGGCGGCGGCCCTATAAAAAGCGAAGCGCGCGGCGGGCGGGAGCAAGCTTCGTT |
| | | TAGTGAACCGTCAGATCGCCTGGAGACGCCATCCACGCTGTTTTGACCTCCATAGAAGACAC |
| | | CGGGACCGATCCAGCCTCCGCGGATTCGAATCCCGGCCGGGAACGGTGCATTGGAACGCGGA |
| | | TTCCCCGTGCCAAGAGTGACGTAAGTACCGCCTATAGAGTCTATAGGCCCACAAAAAATGCT |
| | | TTCTTCTTTTAATATACTTTTTTGTTTATCTTATTTCTAATACTTTCCCTAATCTCTTTCTT |
| | | TCAGGGCAATAATGATACAATGTATCATGCCTCTTTGCACCATTCTAAAGAATAACAGTGAT |
| | | AATTTCTGGGTTAAGGCAATAGCAATATTTCTGCATATAAATATTTCTGCATATAAATTGTA |
| | | ACTGATGTAAGAGGTTTCATATTGCTAATAGCAGCTACAATCCAGCTACCATTCTGCTTTTA |
| | | TTTTATGGTTGGGATAAGGCTGGATTATTCTGAGTCCAAGCTAGGCCCTTTTGCTAATCATG |
| | | TTCATACCTCTTATCTTCCTCCCACAGCTCCTGGGCAACGTGCTGGTCTGTGTGCTGGCCCA |
| | | TCACTTTGGCAAAGAATTGGGATTCGAACCGGTGTGCTGGGCGGGGGGGGGGGGGCCCTCCC |
| | | GCAGAACACCATGCGCTCTTCGGAAAGCTGACCTTCCGCGAGAGCCTGTGACCTGGTTCTCG |
| | | CGGAAGGTCAGCTTTCTGTGGAGCGCCTTGACAGCAGCCATGGGAGGGCCGCCCCCTACCTC |
| | | AGTGACTCGAGGGGTGGCATCCCTGTGACCCCTCCCCAGTGCCTCTCCTGGCCCTGGAAGTT |
| | | GCCACTCCAGTGCCCACCAGCCTTGTCCTAATAAAATTAAGTTGCATCATTTTGTCTGACTA |
| | | GGTGTCCTTCTATAATATTATGGGGTGGAGGGGGGTGGTATGGAGCAAGGGGCAAGTTGGGA |
| | | AGACAACCTGTAGGGCCTGCGGGGTCTATTGGGAACCAAGCTGGAGTGCAGTGGCACAATCT |
| | | TGGCTCACTGCAATCTCCGCCTCCTGGGTTCAAGCGATTCTCCTGCCTCAGCCTCCCGAGTT |
| | | GTTGGGATTCCAGGCATGCATGACCAGGCTCAGCTAATTTTTGTTTTTTTGGTAGAGACGGG |
| | | GTTTCACCATATTGGCCAGGCTGGTCTCCAACTCCTAATCTCAGGTGATCTACCCACCTTGG |
| | | CCTCCCAAATTGCTGGGATTACAGGCGTGAACCACTGCTCCCTTCCCTGTCCTTATCGATGC |
| | | CTAGGGTTAATCATTAACTACAAGGAACCCCTAGTGATGGAGTTGGCCACTCCCTCTCTGCG |
| | | CGCTCGCTCGCTCACTGAGGCCGGGCGACCAAAGGTCGCCCGACGCCCGGGCTTTGCCCGGG |
| | | CGGCCTCAGTGAGCGAGCGAGCGCGCAG |
| VOYTAU38 | 5156 | CTGCGCGCTCGCTCGCTCACTGAGGCCGCCCGGGCAAAGCCCGGGCGTCGGGCGACCTTTGG |
| | | TCGCCCGGCCTCAGTGAGCGAGCGAGCGCGCAGAGAGGGAGTGTAGCCATGCTCTAGGAAGA |
| | | TCAATTCAATTCACGCGTCGACATTGATTATTGACTAGTTATTAATAGTAATCAATTACGGG |
| | | GTCATTAGTTCATAGCCCATATATGGAGTTCCGCGTTACATAACTTACGGTAAATGGCCCGC |
| | | CTGGCTGACCGCCCAACGACCCCCGCCCATTGACGTCAATAATGACGTATGTTCCCATAGTA |
| | | ACGCCAATAGGGACTTTCCATTGACGTCAATGGGTGGAGTATTTACGGTAAACTGCCCACTT |
| | | GGCAGTACATCAAGTGTATCATATGCCAAGTACGCCCCCTATTGACGTCAATGACGGTAAAT |
| | | GGCCCGCCTGGCATTATGCCCAGTACATGACCTTATGGGACTTTCCTACTTGGCAGTACATC |
| | | TACGTATTAGTCATCGCTATTACCATGTCGAGGCCACGTTCTGCTTCACTCTCCCCATCTCC |
| | | CCCCCCTCCCCACCCCCAATTTTGTATTTATTTATTTTTTAATTATTTTGTGCAGCGATGGG |
| | | GGCGGGGGGGGGGGGCGCGCGCCAGGCGGGGCGGGGCGGGGCGAGGGGCGGGGCGGGGCGAG |
| | | GCGGAGAGGTGCGGCGGCAGCCAATCAGAGCGGCGCGCTCCGAAAGTTTCCTTTTATGGCGA |
| | | GGCGGCGGCGGCGGCGGCCCTATAAAAAGCGAAGCGCGCGGCGGGCGGGAGCAAGCTTCGTT |
| | | TAGTGAACCGTCAGATCGCCTGGAGACGCCATCCACGCTGTTTTGACCTCCATAGAAGACAC |
| | | CGGGACCGATCCAGCCTCCGCGGATTCGAATCCCGGCCGGGAACGGTGCATTGGAACGCGGA |
| | | TTCCCCGTGCCAAGAGTGACGTAAGTACCGCCTATAGAGTCTATAGGCCCACAAAAAATGCT |
| | | TTCTTCTTTTAATATACTTTTTTGTTTATCTTATTTCTAATACTTTCCCTAATCTCTTTCTT |
| | | TCAGGGCAATAATGATACAATGTATCATGCCTCTTTGCACCATTCTAAAGAATAACAGTGAT |
| | | AATTTCTGGGTTAAGGCAATAGCAATATTTCTGCATATAAATATTTCTGCATATAAATTGTA |
| | | ACTGATGTAAGAGGTTTCATATTGCTAATAGCAGCTACAATCCAGCTACCATTCTGCTTTTA |
| | | TTTTATGGTTGGGATAAGGCTGGATTATTCTGAGTCCAAGCTAGGCCCTTTTGCTAATCATG |
| | | TTCATACCTCTTATCTTCCTCCCACAGCTCCTGGGCAACGTGCTGGTCTGTGTGCTGGCCCA |
| | | TCACTTTGGCAAAGAATTGGGATTCGAACCGGTGTGCTGGGCGGGGGGCGGCGGGCCCTCCC |
| | | GCAGAACACCATGCGCTCTTCGGAAGCCGTCTTCCGCCAAGAGGCCTGTGACCTGGTCTCTT |
| | | GGCGGAAGACGGCTTCTGTGGAGCGCCTTGACAGCAGCCATGGGAGGGCCGCCCCCTACCTC |
| | | AGTGACTCGAGGGGTGGCATCCCTGTGACCCCTCCCCAGTGCCTCTCCTGGCCCTGGAAGTT |
| | | GCCACTCCAGTGCCCACCAGCCTTGTCCTAATAAAATTAAGTTGCATCATTTTGTCTGACTA |
| | | GGTGTCCTTCTATAATATTATGGGGTGGAGGGGGGTGGTATGGAGCAAGGGGCAAGTTGGGA |
| | | AGACAACCTGTAGGGCCTGCGGGGTCTATTGGGAACCAAGCTGGAGTGCAGTGGCACAATCT |
| | | TGGCTCACTGCAATCTCCGCCTCCTGGGTTCAAGCGATTCTCCTGCCTCAGCCTCCCGAGTT |
| | | GTTGGGATTCCAGGCATGCATGACCAGGCTCAGCTAATTTTTGTTTTTTTGGTAGAGACGGG |
| | | GTTTCACCATATTGGCCAGGCTGGTCTCCAACTCCTAATCTCAGGTGATCTACCCACCTTGG |
| | | CCTCCCAAATTGCTGGGATTACAGGCGTGAACCACTGCTCCCTTCCCTGTCCTTATCGATGC |
| | | CTAGGGTTAATCATTAACTACAAGGAACCCCTAGTGATGGAGTTGGCCACTCCCTCTCTGCG |
| | | CGCTCGCTCGCTCACTGAGGCCGGGCGACCAAAGGTCGCCCGACGCCCGGGCTTTGCCCGGG |
| | | CGGCCTCAGTGAGCGAGCGAGCGCGCAG |
| VOYTAU39 | 5157 | CTGCGCGCTCGCTCGCTCACTGAGGCCGCCCGGGCAAAGCCCGGGCGTCGGGCGACCTTTGG |
| | | TCGCCCGGCCTCAGTGAGCGAGCGAGCGCGCAGAGAGGGAGTGTAGCCATGCTCTAGGAAGA |
| | | TCAATTCAATTCACGCGTCGACATTGATTATTGACTAGTTATTAATAGTAATCAATTACGGG |
| | | GTCATTAGTTCATAGCCCATATATGGAGTTCCGCGTTACATAACTTACGGTAAATGGCCCGC |
| | | CTGGCTGACCGCCCAACGACCCCCGCCCATTGACGTCAATAATGACGTATGTTCCCATAGTA |
| | | ACGCCAATAGGGACTTTCCATTGACGTCAATGGGTGGAGTATTTACGGTAAACTGCCCACTT |
| | | GGCAGTACATCAAGTGTATCATATGCCAAGTACGCCCCCTATTGACGTCAATGACGGTAAAT |
| | | GGCCCGCCTGGCATTATGCCCAGTACATGACCTTATGGGACTTTCCTACTTGGCAGTACATC |
| | | TACGTATTAGTCATCGCTATTACCATGTCGAGGCCACGTTCTGCTTCACTCTCCCCATCTCC |
| | | CCCCCCTCCCCACCCCCAATTTTGTATTTATTTATTTTTTAATTATTTTGTGCAGCGATGGG |
| | | GGCGGGGGGGGGGGGCGCGCGCCAGGCGGGGCGGGGCGGGGCGAGGGGCGGGGCGGGGCGAG |
| | | GCGGAGAGGTGCGGCGGCAGCCAATCAGAGCGGCGCGCTCCGAAAGTTTCCTTTTATGGCGA |
| | | GGCGGCGGCGGCGGCGGCCCTATAAAAAGCGAAGCGCGCGGCGGGCGGGAGCAAGCTTCGTT |
| | | TAGTGAACCGTCAGATCGCCTGGAGACGCCATCCACGCTGTTTTGACCTCCATAGAAGACAC |
| | | CGGGACCGATCCAGCCTCCGCGGATTCGAATCCCGGCCGGGAACGGTGCATTGGAACGCGGA |
| | | TTCCCCGTGCCAAGAGTGACGTAAGTACCGCCTATAGAGTCTATAGGCCCACAAAAAATGCT |
| | | TTCTTCTTTTAATATACTTTTTTGTTTATCTTATTTCTAATACTTTCCCTAATCTCTTTCTT |
| | | TCAGGGCAATAATGATACAATGTATCATGCCTCTTTGCACCATTCTAAAGAATAACAGTGAT |
| | | AATTTCTGGGTTAAGGCAATAGCAATATTTCTGCATATAAATATTTCTGCATATAAATTGTA |
| | | ACTGATGTAAGAGGTTTCATATTGCTAATAGCAGCTACAATCCAGCTACCATTCTGCTTTTA |
| | | TTTTATGGTTGGGATAAGGCTGGATTATTCTGAGTCCAAGCTAGGCCCTTTTGCTAATCATG |
| | | TTCATACCTCTTATCTTCCTCCCACAGCTCCTGGGCAACGTGCTGGTCTGTGTGCTGGCCCA |
| | | TCACTTTGGCAAAGAATTGGGATTCGAACCGGTGTGCTGGGCGGGGGGCGGCGGGCCCTCCC |
| | | GCAGAACACCATGCGCTCTTCGGAACCTCGCAGTACGGTTAATCCCTGTGACCTGGTATTAA |
| | | CCGAACTGCGAGGTTCTGTGGAGCGCCTTGACAGCAGCCATGGGAGGGCCGCCCCCTACCTC |
| | | AGTGACTCGAGGGGTGGCATCCCTGTGACCCCTCCCCAGTGCCTCTCCTGGCCCTGGAAGTT |
| | | GCCACTCCAGTGCCCACCAGCCTTGTCCTAATAAAATTAAGTTGCATCATTTTGTCTGACTA |
| | | GGTGTCCTTCTATAATATTATGGGGTGGAGGGGGGTGGTATGGAGCAAGGGGCAAGTTGGGA |
| | | AGACAACCTGTAGGGCCTGCGGGGTCTATTGGGAACCAAGCTGGAGTGCAGTGGCACAATCT |
| | | TGGCTCACTGCAATCTCCGCCTCCTGGGTTCAAGCGATTCTCCTGCCTCAGCCTCCCGAGTT |
| | | GTTGGGATTCCAGGCATGCATGACCAGGCTCAGCTAATTTTTGTTTTTTTGGTAGAGACGGG |
| | | GTTTCACCATATTGGCCAGGCTGGTCTCCAACTCCTAATCTCAGGTGATCTACCCACCTTGG |
| | | CCTCCCAAATTGCTGGGATTACAGGCGTGAACCACTGCTCCCTTCCCTGTCCTTATCGATGC |
| | | CTAGGGTTAATCATTAACTACAAGGAACCCCTAGTGATGGAGTTGGCCACTCCCTCTCTGCG |
| | | CGCTCGCTCGCTCACTGAGGCCGGGCGACCAAAGGTCGCCCGACGCCCGGGCTTTGCCCGGG |
| | | CGGCCTCAGTGAGCGAGCGAGCGCGCAG |
| VOYTAU40 | 5158 | CTGCGCGCTCGCTCGCTCACTGAGGCCGCCCGGGCAAAGCCCGGGCGTCGGGCGACCTTTGG |
| | | TCGCCCGGCCTCAGTGAGCGAGCGAGCGCGCAGAGAGGGAGTGTAGCCATGCTCTAGGAAGA |
| | | TCAATTCAATTCACGCGTCGACATTGATTATTGACTAGTTATTAATAGTAATCAATTACGGG |
| | | GTCATTAGTTCATAGCCCATATATGGAGTTCCGCGTTACATAACTTACGGTAAATGGCCCGC |
| | | CTGGCTGACCGCCCAACGACCCCCGCCCATTGACGTCAATAATGACGTATGTTCCCATAGTA |
| | | ACGCCAATAGGGACTTTCCATTGACGTCAATGGGTGGAGTATTTACGGTAAACTGCCCACTT |
| | | GGCAGTACATCAAGTGTATCATATGCCAAGTACGCCCCCTATTGACGTCAATGACGGTAAAT |
| | | GGCCCGCCTGGCATTATGCCCAGTACATGACCTTATGGGACTTTCCTACTTGGCAGTACATC |
| | | TACGTATTAGTCATCGCTATTACCATGTCGAGGCCACGTTCTGCTTCACTCTCCCCATCTCC |
| | | CCCCCCTCCCCACCCCCAATTTTGTATTTATTTATTTTTTAATTATTTTGTGCAGCGATGGG |
| | | GGCGGGGGGGGGGGGCGCGCGCCAGGCGGGGCGGGGCGGGGCGAGGGGCGGGGCGGGGCGAG |
| | | GCGGAGAGGTGCGGCGGCAGCCAATCAGAGCGGCGCGCTCCGAAAGTTTCCTTTTATGGCGA |
| | | GGCGGCGGCGGCGGCGGCCCTATAAAAAGCGAAGCGCGCGGCGGGCGGGAGCAAGCTTCGTT |
| | | TAGTGAACCGTCAGATCGCCTGGAGACGCCATCCACGCTGTTTTGACCTCCATAGAAGACAC |
| | | CGGGACCGATCCAGCCTCCGCGGATTCGAATCCCGGCCGGGAACGGTGCATTGGAACGCGGA |
| | | TTCCCCGTGCCAAGAGTGACGTAAGTACCGCCTATAGAGTCTATAGGCCCACAAAAAATGCT |
| | | TTCTTCTTTTAATATACTTTTTTGTTTATCTTATTTCTAATACTTTCCCTAATCTCTTTCTT |
| | | TCAGGGCAATAATGATACAATGTATCATGCCTCTTTGCACCATTCTAAAGAATAACAGTGAT |
| | | AATTTCTGGGTTAAGGCAATAGCAATATTTCTGCATATAAATATTTCTGCATATAAATTGTA |
| | | ACTGATGTAAGAGGTTTCATATTGCTAATAGCAGCTACAATCCAGCTACCATTCTGCTTTTA |
| | | TTTTATGGTTGGGATAAGGCTGGATTATTCTGAGTCCAAGCTAGGCCCTTTTGCTAATCATG |
| | | TTCATACCTCTTATCTTCCTCCCACAGCTCCTGGGCAACGTGCTGGTCTGTGTGCTGGCCCA |
| | | TCACTTTGGCAAAGAATTGGGATTCGAACCGGTGTGCTGGGCGGGGGGCGGCGGGCCCTCCC |
| | | GCAGAACACCATGCGCTCTTCGGAAGCTTTGGCTGGGGACTTCCCCTGTGACCTGGTGAAGT |
| | | CCCGAGCCAAAGCTTCTGTGGAGCGCCTTGACAGCAGCCATGGGAGGGCCGCCCCCTACCTC |
| | | AGTGACTCGAGGGGTGGCATCCCTGTGACCCCTCCCCAGTGCCTCTCCTGGCCCTGGAAGTT |
| | | GCCACTCCAGTGCCCACCAGCCTTGTCCTAATAAAATTAAGTTGCATCATTTTGTCTGACTA |
| | | GGTGTCCTTCTATAATATTATGGGGTGGAGGGGGGTGGTATGGAGCAAGGGGCAAGTTGGGA |
| | | AGACAACCTGTAGGGCCTGCGGGGTCTATTGGGAACCAAGCTGGAGTGCAGTGGCACAATCT |
| | | TGGCTCACTGCAATCTCCGCCTCCTGGGTTCAAGCGATTCTCCTGCCTCAGCCTCCCGAGTT |
| | | GTTGGGATTCCAGGCATGCATGACCAGGCTCAGCTAATTTTTGTTTTTTTGGTAGAGACGGG |
| | | GTTTCACCATATTGGCCAGGCTGGTCTCCAACTCCTAATCTCAGGTGATCTACCCACCTTGG |
| | | CCTCCCAAATTGCTGGGATTACAGGCGTGAACCACTGCTCCCTTCCCTGTCCTTATCGATGC |
| | | CTAGGGTTAATCATTAACTACAAGGAACCCCTAGTGATGGAGTTGGCCACTCCCTCTCTGCG |
| | | CGCTCGCTCGCTCACTGAGGCCGGGCGACCAAAGGTCGCCCGACGCCCGGGCTTTGCCCGGG |
| | | CGGCCTCAGTGAGCGAGCGAGCGCGCAG |
| VOYTAU41 | 5159 | CTGCGCGCTCGCTCGCTCACTGAGGCCGCCCGGGCAAAGCCCGGGCGTCGGGCGACCTTTGG |
| | | TCGCCCGGCCTCAGTGAGCGAGCGAGCGCGCAGAGAGGGAGTGTAGCCATGCTCTAGGAAGA |
| | | TCAATTCAATTCACGCGTCGACATTGATTATTGACTAGTTATTAATAGTAATCAATTACGGG |
| | | GTCATTAGTTCATAGCCCATATATGGAGTTCCGCGTTACATAACTTACGGTAAATGGCCCGC |
| | | CTGGCTGACCGCCCAACGACCCCCGCCCATTGACGTCAATAATGACGTATGTTCCCATAGTA |
| | | ACGCCAATAGGGACTTTCCATTGACGTCAATGGGTGGAGTATTTACGGTAAACTGCCCACTT |
| | | GGCAGTACATCAAGTGTATCATATGCCAAGTACGCCCCCTATTGACGTCAATGACGGTAAAT |
| | | GGCCCGCCTGGCATTATGCCCAGTACATGACCTTATGGGACTTTCCTACTTGGCAGTACATC |
| | | TACGTATTAGTCATCGCTATTACCATGTCGAGGCCACGTTCTGCTTCACTCTCCCCATCTCC |
| | | CCCCCCTCCCCACCCCCAATTTTGTATTTATTTATTTTTTAATTATTTTGTGCAGCGATGGG |
| | | GGCGGGGGGGGGGGGCGCGCGCCAGGCGGGGCGGGGCGGGGCGAGGGGCGGGGCGGGGCGAG |
| | | GCGGAGAGGTGCGGCGGCAGCCAATCAGAGCGGCGCGCTCCGAAAGTTTCCTTTTATGGCGA |
| | | GGCGGCGGCGGCGGCGGCCCTATAAAAAGCGAAGCGCGCGGCGGGCGGGAGCAAGCTTCGTT |
| | | TAGTGAACCGTCAGATCGCCTGGAGACGCCATCCACGCTGTTTTGACCTCCATAGAAGACAC |
| | | CGGGACCGATCCAGCCTCCGCGGATTCGAATCCCGGCCGGGAACGGTGCATTGGAACGCGGA |
| | | TTCCCCGTGCCAAGAGTGACGTAAGTACCGCCTATAGAGTCTATAGGCCCACAAAAAATGCT |
| | | TTCTTCTTTTAATATACTTTTTTGTTTATCTTATTTCTAATACTTTCCCTAATCTCTTTCTT |
| | | TCAGGGCAATAATGATACAATGTATCATGCCTCTTTGCACCATTCTAAAGAATAACAGTGAT |
| | | AATTTCTGGGTTAAGGCAATAGCAATATTTCTGCATATAAATATTTCTGCATATAAATTGTA |
| | | ACTGATGTAAGAGGTTTCATATTGCTAATAGCAGCTACAATCCAGCTACCATTCTGCTTTTA |
| | | TTTTATGGTTGGGATAAGGCTGGATTATTCTGAGTCCAAGCTAGGCCCTTTTGCTAATCATG |
| | | TTCATACCTCTTATCTTCCTCCCACAGCTCCTGGGCAACGTGCTGGTCTGTGTGCTGGCCCA |
| | | TCACTTTGGCAAAGAATTGGGATTCGAACCGGTGTGCTGGGCGGGGGGGGGGGGGCCCTCCC |
| | | GCAGAACACCATGCGCTCTTCGGAAAGCTGACCTACCGCGAGACCCTGTGACCTGGTTCTCG |
| | | CGGAAGGTCAGCTTTCTGTGGAGCGCCTTGACAGCAGCCATGGGAGGGCCGCCCCCTACCTC |
| | | AGTGACTCGAGGGGTGGCATCCCTGTGACCCCTCCCCAGTGCCTCTCCTGGCCCTGGAAGTT |
| | | GCCACTCCAGTGCCCACCAGCCTTGTCCTAATAAAATTAAGTTGCATCATTTTGTCTGACTA |
| | | GGTGTCCTTCTATAATATTATGGGGTGGAGGGGGGTGGTATGGAGCAAGGGGCAAGTTGGGA |
| | | AGACAACCTGTAGGGCCTGCGGGGTCTATTGGGAACCAAGCTGGAGTGCAGTGGCACAATCT |
| | | TGGCTCACTGCAATCTCCGCCTCCTGGGTTCAAGCGATTCTCCTGCCTCAGCCTCCCGAGTT |
| | | GTTGGGATTCCAGGCATGCATGACCAGGCTCAGCTAATTTTTGTTTTTTTGGTAGAGACGGG |
| | | GTTTCACCATATTGGCCAGGCTGGTCTCCAACTCCTAATCTCAGGTGATCTACCCACCTTGG |
| | | CCTCCCAAATTGCTGGGATTACAGGCGTGAACCACTGCTCCCTTCCCTGTCCTTATCGATGC |
| | | CTAGGGTTAATCATTAACTACAAGGAACCCCTAGTGATGGAGTTGGCCACTCCCTCTCTGCG |
| | | CGCTCGCTCGCTCACTGAGGCCGGGCGACCAAAGGTCGCCCGACGCCCGGGCTTTGCCCGGG |
| | | CGGCCTCAGTGAGCGAGCGAGCGCGCAG |
| VOYTAU42 | 5160 | CTGCGCGCTCGCTCGCTCACTGAGGCCGCCCGGGCAAAGCCCGGGCGTCGGGCGACCTTTGG |
| | | TCGCCCGGCCTCAGTGAGCGAGCGAGCGCGCAGAGAGGGAGTGTAGCCATGCTCTAGGAAGA |
| | | TCAATTCAATTCACGCGTCGACATTGATTATTGACTAGTTATTAATAGTAATCAATTACGGG |
| | | GTCATTAGTTCATAGCCCATATATGGAGTTCCGCGTTACATAACTTACGGTAAATGGCCCGC |
| | | CTGGCTGACCGCCCAACGACCCCCGCCCATTGACGTCAATAATGACGTATGTTCCCATAGTA |
| | | ACGCCAATAGGGACTTTCCATTGACGTCAATGGGTGGAGTATTTACGGTAAACTGCCCACTT |
| | | GGCAGTACATCAAGTGTATCATATGCCAAGTACGCCCCCTATTGACGTCAATGACGGTAAAT |
| | | GGCCCGCCTGGCATTATGCCCAGTACATGACCTTATGGGACTTTCCTACTTGGCAGTACATC |
| | | TACGTATTAGTCATCGCTATTACCATGTCGAGGCCACGTTCTGCTTCACTCTCCCCATCTCC |
| | | CCCCCCTCCCCACCCCCAATTTTGTATTTATTTATTTTTTAATTATTTTGTGCAGCGATGGG |
| | | GGCGGGGGGGGGGGGCGCGCGCCAGGCGGGGCGGGGCGGGGCGAGGGGCGGGGCGGGGCGAG |
| | | GCGGAGAGGTGCGGCGGCAGCCAATCAGAGCGGCGCGCTCCGAAAGTTTCCTTTTATGGCGA |
| | | GGCGGCGGCGGCGGCGGCCCTATAAAAAGCGAAGCGCGCGGCGGGGGGGAGCAAGCTTCGTT |
| | | TAGTGAACCGTCAGATCGCCTGGAGACGCCATCCACGCTGTTTTGACCTCCATAGAAGACAC |
| | | CGGGACCGATCCAGCCTCCGCGGATTCGAATCCCGGCCGGGAACGGTGCATTGGAACGCGGA |
| | | TTCCCCGTGCCAAGAGTGACGTAAGTACCGCCTATAGAGTCTATAGGCCCACAAAAAATGCT |
| | | TTCTTCTTTTAATATACTTTTTTGTTTATCTTATTTCTAATACTTTCCCTAATCTCTTTCTT |
| | | TCAGGGCAATAATGATACAATGTATCATGCCTCTTTGCACCATTCTAAAGAATAACAGTGAT |
| | | AATTTCTGGGTTAAGGCAATAGCAATATTTCTGCATATAAATATTTCTGCATATAAATTGTA |
| | | ACTGATGTAAGAGGTTTCATATTGCTAATAGCAGCTACAATCCAGCTACCATTCTGCTTTTA |
| | | TTTTATGGTTGGGATAAGGCTGGATTATTCTGAGTCCAAGCTAGGCCCTTTTGCTAATCATG |
| | | TTCATACCTCTTATCTTCCTCCCACAGCTCCTGGGCAACGTGCTGGTCTGTGTGCTGGCCCA |
| | | TCACTTTGGCAAAGAATTGGGATTCGAACCGGTGTGCTGGGCGGGGGGCGGCGGGCCCTCCC |
| | | GCAGAACACCATGCGCTCTTCGGAAGCCGTCTTCGGCCAAGAGCCCTGTGACCTGGTCTCTT |
| | | GGCGGAAGACGGCTTCTGTGGAGCGCCTTGACAGCAGCCATGGGAGGGCCGCCCCCTACCTC |
| | | AGTGACTCGAGGGGTGGCATCCCTGTGACCCCTCCCCAGTGCCTCTCCTGGCCCTGGAAGTT |
| | | GCCACTCCAGTGCCCACCAGCCTTGTCCTAATAAAATTAAGTTGCATCATTTTGTCTGACTA |
| | | GGTGTCCTTCTATAATATTATGGGGTGGAGGGGGGTGGTATGGAGCAAGGGGCAAGTTGGGA |
| | | AGACAACCTGTAGGGCCTGCGGGGTCTATTGGGAACCAAGCTGGAGTGCAGTGGCACAATCT |
| | | TGGCTCACTGCAATCTCCGCCTCCTGGGTTCAAGCGATTCTCCTGCCTCAGCCTCCCGAGTT |
| | | GTTGGGATTCCAGGCATGCATGACCAGGCTCAGCTAATTTTTGTTTTTTTGGTAGAGACGGG |
| | | GTTTCACCATATTGGCCAGGCTGGTCTCCAACTCCTAATCTCAGGTGATCTACCCACCTTGG |
| | | CCTCCCAAATTGCTGGGATTACAGGCGTGAACCACTGCTCCCTTCCCTGTCCTTATCGATGC |
| | | CTAGGGTTAATCATTAACTACAAGGAACCCCTAGTGATGGAGTTGGCCACTCCCTCTCTGCG |
| | | CGCTCGCTCGCTCACTGAGGCCGGGCGACCAAAGGTCGCCCGACGCCCGGGCTTTGCCCGGG |
| | | CGGCCTCAGTGAGCGAGCGAGCGCGCAG |
| VOYTAU43 | 5161 | CTGCGCGCTCGCTCGCTCACTGAGGCCGCCCGGGCAAAGCCCGGGCGTCGGGCGACCTTTGG |
| | | TCGCCCGGCCTCAGTGAGCGAGCGAGCGCGCAGAGAGGGAGTGTAGCCATGCTCTAGGAAGA |
| | | TCAATTCAATTCACGCGTCGACATTGATTATTGACTAGTTATTAATAGTAATCAATTACGGG |
| | | GTCATTAGTTCATAGCCCATATATGGAGTTCCGCGTTACATAACTTACGGTAAATGGCCCGC |
| | | CTGGCTGACCGCCCAACGACCCCCGCCCATTGACGTCAATAATGACGTATGTTCCCATAGTA |
| | | ACGCCAATAGGGACTTTCCATTGACGTCAATGGGTGGAGTATTTACGGTAAACTGCCCACTT |
| | | GGCAGTACATCAAGTGTATCATATGCCAAGTACGCCCCCTATTGACGTCAATGACGGTAAAT |
| | | GGCCCGCCTGGCATTATGCCCAGTACATGACCTTATGGGACTTTCCTACTTGGCAGTACATC |
| | | TACGTATTAGTCATCGCTATTACCATGTCGAGGCCACGTTCTGCTTCACTCTCCCCATCTCC |
| | | CCCCCCTCCCCACCCCCAATTTTGTATTTATTTATTTTTTAATTATTTTGTGCAGCGATGGG |
| | | GGCGGGGGGGGGGGGCGCGCGCCAGGCGGGGCGGGGCGGGGCGAGGGGCGGGGCGGGGCGAG |
| | | GCGGAGAGGTGCGGCGGCAGCCAATCAGAGCGGCGCGCTCCGAAAGTTTCCTTTTATGGCGA |
| | | GGCGGCGGCGGCGGCGGCCCTATAAAAAGCGAAGCGCGCGGCGGGCGGGAGCAAGCTTCGTT |
| | | TAGTGAACCGTCAGATCGCCTGGAGACGCCATCCACGCTGTTTTGACCTCCATAGAAGACAC |
| | | CGGGACCGATCCAGCCTCCGCGGATTCGAATCCCGGCCGGGAACGGTGCATTGGAACGCGGA |
| | | TTCCCCGTGCCAAGAGTGACGTAAGTACCGCCTATAGAGTCTATAGGCCCACAAAAAATGCT |
| | | TTCTTCTTTTAATATACTTTTTTGTTTATCTTATTTCTAATACTTTCCCTAATCTCTTTCTT |
| | | TCAGGGCAATAATGATACAATGTATCATGCCTCTTTGCACCATTCTAAAGAATAACAGTGAT |
| | | AATTTCTGGGTTAAGGCAATAGCAATATTTCTGCATATAAATATTTCTGCATATAAATTGTA |
| | | ACTGATGTAAGAGGTTTCATATTGCTAATAGCAGCTACAATCCAGCTACCATTCTGCTTTTA |
| | | TTTTATGGTTGGGATAAGGCTGGATTATTCTGAGTCCAAGCTAGGCCCTTTTGCTAATCATG |
| | | TTCATACCTCTTATCTTCCTCCCACAGCTCCTGGGCAACGTGCTGGTCTGTGTGCTGGCCCA |
| | | TCACTTTGGCAAAGAATTGGGATTCGAACCGGTGTGCTGGGCGGGGGGCGGCGGGCCCTCCC |
| | | GCAGAACACCATGCGCTCTTCGGAACCTCGCAGTTCGGTTAATTCCTGTGATTTGGTATTAA |
| | | CCGAACTGCGAGGTTCTGAGGAGCGCCTTGACAGCAGCCATGGGAGGGCCGCCCCCTACCTC |
| | | AGTGACTCGAGGGGTGGCATCCCTGTGACCCCTCCCCAGTGCCTCTCCTGGCCCTGGAAGTT |
| | | GCCACTCCAGTGCCCACCAGCCTTGTCCTAATAAAATTAAGTTGCATCATTTTGTCTGACTA |
| | | GGTGTCCTTCTATAATATTATGGGGTGGAGGGGGGTGGTATGGAGCAAGGGGCAAGTTGGGA |
| | | AGACAACCTGTAGGGCCTGCGGGGTCTATTGGGAACCAAGCTGGAGTGCAGTGGCACAATCT |
| | | TGGCTCACTGCAATCTCCGCCTCCTGGGTTCAAGCGATTCTCCTGCCTCAGCCTCCCGAGTT |
| | | GTTGGGATTCCAGGCATGCATGACCAGGCTCAGCTAATTTTTGTTTTTTTGGTAGAGACGGG |
| | | GTTTCACCATATTGGCCAGGCTGGTCTCCAACTCCTAATCTCAGGTGATCTACCCACCTTGG |
| | | CCTCCCAAATTGCTGGGATTACAGGCGTGAACCACTGCTCCCTTCCCTGTCCTTATCGATGC |
| | | CTAGGGTTAATCATTAACTACAAGGAACCCCTAGTGATGGAGTTGGCCACTCCCTCTCTGCG |
| | | CGCTCGCTCGCTCACTGAGGCCGGGCGACCAAAGGTCGCCCGACGCCCGGGCTTTGCCCGGG |
| | | CGGCCTCAGTGAGCGAGCGAGCGCGCAG |
| VOYTAU44 | 5162 | CTGCGCGCTCGCTCGCTCACTGAGGCCGCCCGGGCAAAGCCCGGGCGTCGGGCGACCTTTGG |
| | | TCGCCCGGCCTCAGTGAGCGAGCGAGCGCGCAGAGAGGGAGTGTAGCCATGCTCTAGGAAGA |
| | | TCAATTCAATTCACGCGTCGACATTGATTATTGACTAGTTATTAATAGTAATCAATTACGGG |
| | | GTCATTAGTTCATAGCCCATATATGGAGTTCCGCGTTACATAACTTACGGTAAATGGCCCGC |
| | | CTGGCTGACCGCCCAACGACCCCCGCCCATTGACGTCAATAATGACGTATGTTCCCATAGTA |
| | | ACGCCAATAGGGACTTTCCATTGACGTCAATGGGTGGAGTATTTACGGTAAACTGCCCACTT |
| | | GGCAGTACATCAAGTGTATCATATGCCAAGTACGCCCCCTATTGACGTCAATGACGGTAAAT |
| | | GGCCCGCCTGGCATTATGCCCAGTACATGACCTTATGGGACTTTCCTACTTGGCAGTACATC |
| | | TACGTATTAGTCATCGCTATTACCATGTCGAGGCCACGTTCTGCTTCACTCTCCCCATCTCC |
| | | CCCCCCTCCCCACCCCCAATTTTGTATTTATTTATTTTTTAATTATTTTGTGCAGCGATGGG |
| | | GGCGGGGGGGGGGGGCGCGCGCCAGGCGGGGCGGGGCGGGGCGAGGGGCGGGGCGGGGCGAG |
| | | GCGGAGAGGTGCGGCGGCAGCCAATCAGAGCGGCGCGCTCCGAAAGTTTCCTTTTATGGCGA |
| | | GGCGGCGGCGGCGGCGGCCCTATAAAAAGCGAAGCGCGCGGCGGGCGGGAGCAAGCTTCGTT |
| | | TAGTGAACCGTCAGATCGCCTGGAGACGCCATCCACGCTGTTTTGACCTCCATAGAAGACAC |
| | | CGGGACCGATCCAGCCTCCGCGGATTCGAATCCCGGCCGGGAACGGTGCATTGGAACGCGGA |
| | | TTCCCCGTGCCAAGAGTGACGTAAGTACCGCCTATAGAGTCTATAGGCCCACAAAAAATGCT |
| | | TTCTTCTTTTAATATACTTTTTTGTTTATCTTATTTCTAATACTTTCCCTAATCTCTTTCTT |
| | | TCAGGGCAATAATGATACAATGTATCATGCCTCTTTGCACCATTCTAAAGAATAACAGTGAT |
| | | AATTTCTGGGTTAAGGCAATAGCAATATTTCTGCATATAAATATTTCTGCATATAAATTGTA |
| | | ACTGATGTAAGAGGTTTCATATTGCTAATAGCAGCTACAATCCAGCTACCATTCTGCTTTTA |
| | | TTTTATGGTTGGGATAAGGCTGGATTATTCTGAGTCCAAGCTAGGCCCTTTTGCTAATCATG |
| | | TTCATACCTCTTATCTTCCTCCCACAGCTCCTGGGCAACGTGCTGGTCTGTGTGCTGGCCCA |
| | | TCACTTTGGCAAAGAATTGGGATTCGAACCGGTGTGCTGGGCGGGGGGCGGCGGGCCCTCCC |
| | | GCAGAACACCATGCGCTCTTCGGAAGCTTTGGCTCGGGACTTCTCCTGTGATTTGGTGAAGT |
| | | CCCGAGCCAAAGCTTCTGAGGAGCGCCTTGACAGCAGCCATGGGAGGGCCGCCCCCTACCTC |
| | | AGTGACTCGAGGGGTGGCATCCCTGTGACCCCTCCCCAGTGCCTCTCCTGGCCCTGGAAGTT |
| | | GCCACTCCAGTGCCCACCAGCCTTGTCCTAATAAAATTAAGTTGCATCATTTTGTCTGACTA |
| | | GGTGTCCTTCTATAATATTATGGGGTGGAGGGGGGTGGTATGGAGCAAGGGGCAAGTTGGGA |
| | | AGACAACCTGTAGGGCCTGCGGGGTCTATTGGGAACCAAGCTGGAGTGCAGTGGCACAATCT |
| | | TGGCTCACTGCAATCTCCGCCTCCTGGGTTCAAGCGATTCTCCTGCCTCAGCCTCCCGAGTT |
| | | GTTGGGATTCCAGGCATGCATGACCAGGCTCAGCTAATTTTTGTTTTTTTGGTAGAGACGGG |
| | | GTTTCACCATATTGGCCAGGCTGGTCTCCAACTCCTAATCTCAGGTGATCTACCCACCTTGG |
| | | CCTCCCAAATTGCTGGGATTACAGGCGTGAACCACTGCTCCCTTCCCTGTCCTTATCGATGC |
| | | CTAGGGTTAATCATTAACTACAAGGAACCCCTAGTGATGGAGTTGGCCACTCCCTCTCTGCG |
| | | CGCTCGCTCGCTCACTGAGGCCGGGCGACCAAAGGTCGCCCGACGCCCGGGCTTTGCCCGGG |
| | | CGGCCTCAGTGAGCGAGCGAGCGCGCAG |
| VOYTAU45 | 5163 | CTGCGCGCTCGCTCGCTCACTGAGGCCGCCCGGGCAAAGCCCGGGCGTCGGGCGACCTTTGG |
| | | TCGCCCGGCCTCAGTGAGCGAGCGAGCGCGCAGAGAGGGAGTGTAGCCATGCTCTAGGAAGA |
| | | TCAATTCAATTCACGCGTCGACATTGATTATTGACTAGTTATTAATAGTAATCAATTACGGG |
| | | GTCATTAGTTCATAGCCCATATATGGAGTTCCGCGTTACATAACTTACGGTAAATGGCCCGC |
| | | CTGGCTGACCGCCCAACGACCCCCGCCCATTGACGTCAATAATGACGTATGTTCCCATAGTA |
| | | ACGCCAATAGGGACTTTCCATTGACGTCAATGGGTGGAGTATTTACGGTAAACTGCCCACTT |
| | | GGCAGTACATCAAGTGTATCATATGCCAAGTACGCCCCCTATTGACGTCAATGACGGTAAAT |
| | | GGCCCGCCTGGCATTATGCCCAGTACATGACCTTATGGGACTTTCCTACTTGGCAGTACATC |
| | | TACGTATTAGTCATCGCTATTACCATGTCGAGGCCACGTTCTGCTTCACTCTCCCCATCTCC |
| | | CCCCCCTCCCCACCCCCAATTTTGTATTTATTTATTTTTTAATTATTTTGTGCAGCGATGGG |
| | | GGCGGGGGGGGGGGGCGCGCGCCAGGCGGGGCGGGGCGGGGCGAGGGGCGGGGCGGGGCGAG |
| | | GCGGAGAGGTGCGGCGGCAGCCAATCAGAGCGGCGCGCTCCGAAAGTTTCCTTTTATGGCGA |
| | | GGCGGCGGCGGCGGCGGCCCTATAAAAAGCGAAGCGCGCGGCGGGCGGGAGCAAGCTTCGTT |
| | | TAGTGAACCGTCAGATCGCCTGGAGACGCCATCCACGCTGTTTTGACCTCCATAGAAGACAC |
| | | CGGGACCGATCCAGCCTCCGCGGATTCGAATCCCGGCCGGGAACGGTGCATTGGAACGCGGA |
| | | TTCCCCGTGCCAAGAGTGACGTAAGTACCGCCTATAGAGTCTATAGGCCCACAAAAAATGCT |
| | | TTCTTCTTTTAATATACTTTTTTGTTTATCTTATTTCTAATACTTTCCCTAATCTCTTTCTT |
| | | TCAGGGCAATAATGATACAATGTATCATGCCTCTTTGCACCATTCTAAAGAATAACAGTGAT |
| | | AATTTCTGGGTTAAGGCAATAGCAATATTTCTGCATATAAATATTTCTGCATATAAATTGTA |
| | | ACTGATGTAAGAGGTTTCATATTGCTAATAGCAGCTACAATCCAGCTACCATTCTGCTTTTA |
| | | TTTTATGGTTGGGATAAGGCTGGATTATTCTGAGTCCAAGCTAGGCCCTTTTGCTAATCATG |
| | | TTCATACCTCTTATCTTCCTCCCACAGCTCCTGGGCAACGTGCTGGTCTGTGTGCTGGCCCA |
| | | TCACTTTGGCAAAGAATTGGGATTCGAACCGGTGTGCTGGGCGGGGGGCGGCGGGCCCTCCC |
| | | GCAGAACACCATGCGCTCTTCGGAAAGCTGACCTTCCGCGAGATCCTGTGATTTGGTTCTCG |
| | | CGGAAGGTCAGCTTTCTGAGGAGCGCCTTGACAGCAGCCATGGGAGGGCCGCCCCCTACCTC |
| | | AGTGACTCGAGGGGTGGCATCCCTGTGACCCCTCCCCAGTGCCTCTCCTGGCCCTGGAAGTT |
| | | GCCACTCCAGTGCCCACCAGCCTTGTCCTAATAAAATTAAGTTGCATCATTTTGTCTGACTA |
| | | GGTGTCCTTCTATAATATTATGGGGTGGAGGGGGGTGGTATGGAGCAAGGGGCAAGTTGGGA |
| | | AGACAACCTGTAGGGCCTGCGGGGTCTATTGGGAACCAAGCTGGAGTGCAGTGGCACAATCT |
| | | TGGCTCACTGCAATCTCCGCCTCCTGGGTTCAAGCGATTCTCCTGCCTCAGCCTCCCGAGTT |
| | | GTTGGGATTCCAGGCATGCATGACCAGGCTCAGCTAATTTTTGTTTTTTTGGTAGAGACGGG |
| | | GTTTCACCATATTGGCCAGGCTGGTCTCCAACTCCTAATCTCAGGTGATCTACCCACCTTGG |
| | | CCTCCCAAATTGCTGGGATTACAGGCGTGAACCACTGCTCCCTTCCCTGTCCTTATCGATGC |
| | | CTAGGGTTAATCATTAACTACAAGGAACCCCTAGTGATGGAGTTGGCCACTCCCTCTCTGCG |
| | | CGCTCGCTCGCTCACTGAGGCCGGGCGACCAAAGGTCGCCCGACGCCCGGGCTTTGCCCGGG |
| | | CGGCCTCAGTGAGCGAGCGAGCGCGCAG |
| VOYTAU46 | 5164 | CTGCGCGCTCGCTCGCTCACTGAGGCCGCCCGGGCAAAGCCCGGGCGTCGGGCGACCTTTGG |
| | | TCGCCCGGCCTCAGTGAGCGAGCGAGCGCGCAGAGAGGGAGTGTAGCCATGCTCTAGGAAGA |
| | | TCAATTCAATTCACGCGTCGACATTGATTATTGACTAGTTATTAATAGTAATCAATTACGGG |
| | | GTCATTAGTTCATAGCCCATATATGGAGTTCCGCGTTACATAACTTACGGTAAATGGCCCGC |
| | | CTGGCTGACCGCCCAACGACCCCCGCCCATTGACGTCAATAATGACGTATGTTCCCATAGTA |
| | | ACGCCAATAGGGACTTTCCATTGACGTCAATGGGTGGAGTATTTACGGTAAACTGCCCACTT |
| | | GGCAGTACATCAAGTGTATCATATGCCAAGTACGCCCCCTATTGACGTCAATGACGGTAAAT |
| | | GGCCCGCCTGGCATTATGCCCAGTACATGACCTTATGGGACTTTCCTACTTGGCAGTACATC |
| | | TACGTATTAGTCATCGCTATTACCATGTCGAGGCCACGTTCTGCTTCACTCTCCCCATCTCC |
| | | CCCCCCTCCCCACCCCCAATTTTGTATTTATTTATTTTTTAATTATTTTGTGCAGCGATGGG |
| | | GGCGGGGGGGGGGGGCGCGCGCCAGGCGGGGCGGGGCGGGGCGAGGGGCGGGGCGGGGCGAG |
| | | GCGGAGAGGTGCGGCGGCAGCCAATCAGAGCGGCGCGCTCCGAAAGTTTCCTTTTATGGCGA |
| | | GGCGGCGGCGGCGGCGGCCCTATAAAAAGCGAAGCGCGCGGCGGGCGGGAGCAAGCTTCGTT |
| | | TAGTGAACCGTCAGATCGCCTGGAGACGCCATCCACGCTGTTTTGACCTCCATAGAAGACAC |
| | | CGGGACCGATCCAGCCTCCGCGGATTCGAATCCCGGCCGGGAACGGTGCATTGGAACGCGGA |
| | | TTCCCCGTGCCAAGAGTGACGTAAGTACCGCCTATAGAGTCTATAGGCCCACAAAAAATGCT |
| | | TTCTTCTTTTAATATACTTTTTTGTTTATCTTATTTCTAATACTTTCCCTAATCTCTTTCTT |
| | | TCAGGGCAATAATGATACAATGTATCATGCCTCTTTGCACCATTCTAAAGAATAACAGTGAT |
| | | AATTTCTGGGTTAAGGCAATAGCAATATTTCTGCATATAAATATTTCTGCATATAAATTGTA |
| | | ACTGATGTAAGAGGTTTCATATTGCTAATAGCAGCTACAATCCAGCTACCATTCTGCTTTTA |
| | | TTTTATGGTTGGGATAAGGCTGGATTATTCTGAGTCCAAGCTAGGCCCTTTTGCTAATCATG |
| | | TTCATACCTCTTATCTTCCTCCCACAGCTCCTGGGCAACGTGCTGGTCTGTGTGCTGGCCCA |
| | | TCACTTTGGCAAAGAATTGGGATTCGAACCGGTGTGCTGGGCGGGGGGCGGCGGGCCCTCCC |
| | | GCAGAACACCATGCGCTCTTCGGAAGCCGTCTTCCGCCAAGAGTCCTGTGATTTGGTCTCTT |
| | | GGCGGAAGACGGCTTCTGAGGAGCGCCTTGACAGCAGCCATGGGAGGGCCGCCCCCTACCTC |
| | | AGTGACTCGAGGGGTGGCATCCCTGTGACCCCTCCCCAGTGCCTCTCCTGGCCCTGGAAGTT |
| | | GCCACTCCAGTGCCCACCAGCCTTGTCCTAATAAAATTAAGTTGCATCATTTTGTCTGACTA |
| | | GGTGTCCTTCTATAATATTATGGGGTGGAGGGGGGTGGTATGGAGCAAGGGGCAAGTTGGGA |
| | | AGACAACCTGTAGGGCCTGCGGGGTCTATTGGGAACCAAGCTGGAGTGCAGTGGCACAATCT |
| | | TGGCTCACTGCAATCTCCGCCTCCTGGGTTCAAGCGATTCTCCTGCCTCAGCCTCCCGAGTT |
| | | GTTGGGATTCCAGGCATGCATGACCAGGCTCAGCTAATTTTTGTTTTTTTGGTAGAGACGGG |
| | | GTTTCACCATATTGGCCAGGCTGGTCTCCAACTCCTAATCTCAGGTGATCTACCCACCTTGG |
| | | CCTCCCAAATTGCTGGGATTACAGGCGTGAACCACTGCTCCCTTCCCTGTCCTTATCGATGC |
| | | CTAGGGTTAATCATTAACTACAAGGAACCCCTAGTGATGGAGTTGGCCACTCCCTCTCTGCG |
| | | CGCTCGCTCGCTCACTGAGGCCGGGCGACCAAAGGTCGCCCGACGCCCGGGCTTTGCCCGGG |
| | | CGGCCTCAGTGAGCGAGCGAGCGCGCAG |
| VOYTAU47 | 5165 | CTGCGCGCTCGCTCGCTCACTGAGGCCGCCCGGGCAAAGCCCGGGCGTCGGGCGACCTTTGG |
| | | TCGCCCGGCCTCAGTGAGCGAGCGAGCGCGCAGAGAGGGAGTGTAGCCATGCTCTAGGAAGA |
| | | TCAATTCAATTCACGCGTCGACATTGATTATTGACTAGTTATTAATAGTAATCAATTACGGG |
| | | GTCATTAGTTCATAGCCCATATATGGAGTTCCGCGTTACATAACTTACGGTAAATGGCCCGC |
| | | CTGGCTGACCGCCCAACGACCCCCGCCCATTGACGTCAATAATGACGTATGTTCCCATAGTA |
| | | ACGCCAATAGGGACTTTCCATTGACGTCAATGGGTGGAGTATTTACGGTAAACTGCCCACTT |
| | | GGCAGTACATCAAGTGTATCATATGCCAAGTACGCCCCCTATTGACGTCAATGACGGTAAAT |
| | | GGCCCGCCTGGCATTATGCCCAGTACATGACCTTATGGGACTTTCCTACTTGGCAGTACATC |
| | | TACGTATTAGTCATCGCTATTACCATGTCGAGGCCACGTTCTGCTTCACTCTCCCCATCTCC |
| | | CCCCCCTCCCCACCCCCAATTTTGTATTTATTTATTTTTTAATTATTTTGTGCAGCGATGGG |
| | | GGCGGGGGGGGGGGGCGCGCGCCAGGCGGGGCGGGGCGGGGCGAGGGGCGGGGCGGGGCGAG |
| | | GCGGAGAGGTGCGGCGGCAGCCAATCAGAGCGGCGCGCTCCGAAAGTTTCCTTTTATGGCGA |
| | | GGCGGCGGCGGCGGCGGCCCTATAAAAAGCGAAGCGCGCGGCGGGCGGGAGCAAGCTTCGTT |
| | | TAGTGAACCGTCAGATCGCCTGGAGACGCCATCCACGCTGTTTTGACCTCCATAGAAGACAC |
| | | CGGGACCGATCCAGCCTCCGCGGATTCGAATCCCGGCCGGGAACGGTGCATTGGAACGCGGA |
| | | TTCCCCGTGCCAAGAGTGACGTAAGTACCGCCTATAGAGTCTATAGGCCCACAAAAAATGCT |
| | | TTCTTCTTTTAATATACTTTTTTGTTTATCTTATTTCTAATACTTTCCCTAATCTCTTTCTT |
| | | TCAGGGCAATAATGATACAATGTATCATGCCTCTTTGCACCATTCTAAAGAATAACAGTGAT |
| | | AATTTCTGGGTTAAGGCAATAGCAATATTTCTGCATATAAATATTTCTGCATATAAATTGTA |
| | | ACTGATGTAAGAGGTTTCATATTGCTAATAGCAGCTACAATCCAGCTACCATTCTGCTTTTA |
| | | TTTTATGGTTGGGATAAGGCTGGATTATTCTGAGTCCAAGCTAGGCCCTTTTGCTAATCATG |
| | | TTCATACCTCTTATCTTCCTCCCACAGCTCCTGGGCAACGTGCTGGTCTGTGTGCTGGCCCA |
| | | TCACTTTGGCAAAGAATTGGGATTCGAACCGGTGTGCTGGGCGGGGGGCGGCGGGCCCTCCC |
| | | GCAGAACACCATGCGCTCTTCGGAACCTCGCAGTTCGGTTAATACCTGTGACCTGGTATTAA |
| | | CCGAACTGCGAGGTTCTGAGGAGCGCCTTGACAGCAGCCATGGGAGGGCCGCCCCCTACCTC |
| | | AGTGACTCGAGGGGTGGCATCCCTGTGACCCCTCCCCAGTGCCTCTCCTGGCCCTGGAAGTT |
| | | GCCACTCCAGTGCCCACCAGCCTTGTCCTAATAAAATTAAGTTGCATCATTTTGTCTGACTA |
| | | GGTGTCCTTCTATAATATTATGGGGTGGAGGGGGGTGGTATGGAGCAAGGGGCAAGTTGGGA |
| | | AGACAACCTGTAGGGCCTGCGGGGTCTATTGGGAACCAAGCTGGAGTGCAGTGGCACAATCT |
| | | TGGCTCACTGCAATCTCCGCCTCCTGGGTTCAAGCGATTCTCCTGCCTCAGCCTCCCGAGTT |
| | | GTTGGGATTCCAGGCATGCATGACCAGGCTCAGCTAATTTTTGTTTTTTTGGTAGAGACGGG |
| | | GTTTCACCATATTGGCCAGGCTGGTCTCCAACTCCTAATCTCAGGTGATCTACCCACCTTGG |
| | | CCTCCCAAATTGCTGGGATTACAGGCGTGAACCACTGCTCCCTTCCCTGTCCTTATCGATGC |
| | | CTAGGGTTAATCATTAACTACAAGGAACCCCTAGTGATGGAGTTGGCCACTCCCTCTCTGCG |
| | | CGCTCGCTCGCTCACTGAGGCCGGGCGACCAAAGGTCGCCCGACGCCCGGGCTTTGCCCGGG |
| | | CGGCCTCAGTGAGCGAGCGAGCGCGCAG |
| VOYTAU48 | 5166 | CTGCGCGCTCGCTCGCTCACTGAGGCCGCCCGGGCAAAGCCCGGGCGTCGGGCGACCTTTGG |
| | | TCGCCCGGCCTCAGTGAGCGAGCGAGCGCGCAGAGAGGGAGTGTAGCCATGCTCTAGGAAGA |
| | | TCAATTCAATTCACGCGTCGACATTGATTATTGACTAGTTATTAATAGTAATCAATTACGGG |
| | | GTCATTAGTTCATAGCCCATATATGGAGTTCCGCGTTACATAACTTACGGTAAATGGCCCGC |
| | | CTGGCTGACCGCCCAACGACCCCCGCCCATTGACGTCAATAATGACGTATGTTCCCATAGTA |
| | | ACGCCAATAGGGACTTTCCATTGACGTCAATGGGTGGAGTATTTACGGTAAACTGCCCACTT |
| | | GGCAGTACATCAAGTGTATCATATGCCAAGTACGCCCCCTATTGACGTCAATGACGGTAAAT |
| | | GGCCCGCCTGGCATTATGCCCAGTACATGACCTTATGGGACTTTCCTACTTGGCAGTACATC |
| | | TACGTATTAGTCATCGCTATTACCATGTCGAGGCCACGTTCTGCTTCACTCTCCCCATCTCC |
| | | CCCCCCTCCCCACCCCCAATTTTGTATTTATTTATTTTTTAATTATTTTGTGCAGCGATGGG |
| | | GGCGGGGGGGGGGGGCGCGCGCCAGGCGGGGCGGGGCGGGGCGAGGGGCGGGGCGGGGCGAG |
| | | GCGGAGAGGTGCGGCGGCAGCCAATCAGAGCGGCGCGCTCCGAAAGTTTCCTTTTATGGCGA |
| | | GGCGGCGGCGGCGGCGGCCCTATAAAAAGCGAAGCGCGCGGCGGGCGGGAGCAAGCTTCGTT |
| | | TAGTGAACCGTCAGATCGCCTGGAGACGCCATCCACGCTGTTTTGACCTCCATAGAAGACAC |
| | | CGGGACCGATCCAGCCTCCGCGGATTCGAATCCCGGCCGGGAACGGTGCATTGGAACGCGGA |
| | | TTCCCCGTGCCAAGAGTGACGTAAGTACCGCCTATAGAGTCTATAGGCCCACAAAAAATGCT |
| | | TTCTTCTTTTAATATACTTTTTTGTTTATCTTATTTCTAATACTTTCCCTAATCTCTTTCTT |
| | | TCAGGGCAATAATGATACAATGTATCATGCCTCTTTGCACCATTCTAAAGAATAACAGTGAT |
| | | AATTTCTGGGTTAAGGCAATAGCAATATTTCTGCATATAAATATTTCTGCATATAAATTGTA |
| | | ACTGATGTAAGAGGTTTCATATTGCTAATAGCAGCTACAATCCAGCTACCATTCTGCTTTTA |
| | | TTTTATGGTTGGGATAAGGCTGGATTATTCTGAGTCCAAGCTAGGCCCTTTTGCTAATCATG |
| | | TTCATACCTCTTATCTTCCTCCCACAGCTCCTGGGCAACGTGCTGGTCTGTGTGCTGGCCCA |
| | | TCACTTTGGCAAAGAATTGGGATTCGAACCGGTGTGCTGGGCGGGGGGCGGCGGGCCCTCCC |
| | | GCAGAACACCATGCGCTCTTCGGAAGCTTTGGCTCGGGACTTCACCTGTGACCTGGTGAAGT |
| | | CCCGAGCCAAAGCTTCTGAGGAGCGCCTTGACAGCAGCCATGGGAGGGCCGCCCCCTACCTC |
| | | AGTGACTCGAGGGGTGGCATCCCTGTGACCCCTCCCCAGTGCCTCTCCTGGCCCTGGAAGTT |
| | | GCCACTCCAGTGCCCACCAGCCTTGTCCTAATAAAATTAAGTTGCATCATTTTGTCTGACTA |
| | | GGTGTCCTTCTATAATATTATGGGGTGGAGGGGGGTGGTATGGAGCAAGGGGCAAGTTGGGA |
| | | AGACAACCTGTAGGGCCTGCGGGGTCTATTGGGAACCAAGCTGGAGTGCAGTGGCACAATCT |
| | | TGGCTCACTGCAATCTCCGCCTCCTGGGTTCAAGCGATTCTCCTGCCTCAGCCTCCCGAGTT |
| | | GTTGGGATTCCAGGCATGCATGACCAGGCTCAGCTAATTTTTGTTTTTTTGGTAGAGACGGG |
| | | GTTTCACCATATTGGCCAGGCTGGTCTCCAACTCCTAATCTCAGGTGATCTACCCACCTTGG |
| | | CCTCCCAAATTGCTGGGATTACAGGCGTGAACCACTGCTCCCTTCCCTGTCCTTATCGATGC |
| | | CTAGGGTTAATCATTAACTACAAGGAACCCCTAGTGATGGAGTTGGCCACTCCCTCTCTGCG |
| | | CGCTCGCTCGCTCACTGAGGCCGGGCGACCAAAGGTCGCCCGACGCCCGGGCTTTGCCCGGG |
| | | CGGCCTCAGTGAGCGAGCGAGCGCGCAG |
| VOYTAU49 | 5167 | CTGCGCGCTCGCTCGCTCACTGAGGCCGCCCGGGCAAAGCCCGGGCGTCGGGCGACCTTTGG |
| | | TCGCCCGGCCTCAGTGAGCGAGCGAGCGCGCAGAGAGGGAGTGTAGCCATGCTCTAGGAAGA |
| | | TCAATTCAATTCACGCGTCGACATTGATTATTGACTAGTTATTAATAGTAATCAATTACGGG |
| | | GTCATTAGTTCATAGCCCATATATGGAGTTCCGCGTTACATAACTTACGGTAAATGGCCCGC |
| | | CTGGCTGACCGCCCAACGACCCCCGCCCATTGACGTCAATAATGACGTATGTTCCCATAGTA |
| | | ACGCCAATAGGGACTTTCCATTGACGTCAATGGGTGGAGTATTTACGGTAAACTGCCCACTT |
| | | GGCAGTACATCAAGTGTATCATATGCCAAGTACGCCCCCTATTGACGTCAATGACGGTAAAT |
| | | GGCCCGCCTGGCATTATGCCCAGTACATGACCTTATGGGACTTTCCTACTTGGCAGTACATC |
| | | TACGTATTAGTCATCGCTATTACCATGTCGAGGCCACGTTCTGCTTCACTCTCCCCATCTCC |
| | | CCCCCCTCCCCACCCCCAATTTTGTATTTATTTATTTTTTAATTATTTTGTGCAGCGATGGG |
| | | GGCGGGGGGGGGGGGCGCGCGCCAGGCGGGGCGGGGCGGGGCGAGGGGCGGGGCGGGGCGAG |
| | | GCGGAGAGGTGCGGCGGCAGCCAATCAGAGCGGCGCGCTCCGAAAGTTTCCTTTTATGGCGA |
| | | GGCGGCGGCGGCGGCGGCCCTATAAAAAGCGAAGCGCGCGGCGGGCGGGAGCAAGCTTCGTT |
| | | TAGTGAACCGTCAGATCGCCTGGAGACGCCATCCACGCTGTTTTGACCTCCATAGAAGACAC |
| | | CGGGACCGATCCAGCCTCCGCGGATTCGAATCCCGGCCGGGAACGGTGCATTGGAACGCGGA |
| | | TTCCCCGTGCCAAGAGTGACGTAAGTACCGCCTATAGAGTCTATAGGCCCACAAAAAATGCT |
| | | TTCTTCTTTTAATATACTTTTTTGTTTATCTTATTTCTAATACTTTCCCTAATCTCTTTCTT |
| | | TCAGGGCAATAATGATACAATGTATCATGCCTCTTTGCACCATTCTAAAGAATAACAGTGAT |
| | | AATTTCTGGGTTAAGGCAATAGCAATATTTCTGCATATAAATATTTCTGCATATAAATTGTA |
| | | ACTGATGTAAGAGGTTTCATATTGCTAATAGCAGCTACAATCCAGCTACCATTCTGCTTTTA |
| | | TTTTATGGTTGGGATAAGGCTGGATTATTCTGAGTCCAAGCTAGGCCCTTTTGCTAATCATG |
| | | TTCATACCTCTTATCTTCCTCCCACAGCTCCTGGGCAACGTGCTGGTCTGTGTGCTGGCCCA |
| | | TCACTTTGGCAAAGAATTGGGATTCGAACCGGTGTGCTGGGCGGGGGGCGGCGGGCCCTCCC |
| | | GCAGAACACCATGCGCTCTTCGGAAAGCTGACCTTCCGCGAGAACCTGTGACCTGGTTCTCG |
| | | CGGAAGGTCAGCTTTCTGAGGAGCGCCTTGACAGCAGCCATGGGAGGGCCGCCCCCTACCTC |
| | | AGTGACTCGAGGGGTGGCATCCCTGTGACCCCTCCCCAGTGCCTCTCCTGGCCCTGGAAGTT |
| | | GCCACTCCAGTGCCCACCAGCCTTGTCCTAATAAAATTAAGTTGCATCATTTTGTCTGACTA |
| | | GGTGTCCTTCTATAATATTATGGGGTGGAGGGGGGTGGTATGGAGCAAGGGGCAAGTTGGGA |
| | | AGACAACCTGTAGGGCCTGCGGGGTCTATTGGGAACCAAGCTGGAGTGCAGTGGCACAATCT |
| | | TGGCTCACTGCAATCTCCGCCTCCTGGGTTCAAGCGATTCTCCTGCCTCAGCCTCCCGAGTT |
| | | GTTGGGATTCCAGGCATGCATGACCAGGCTCAGCTAATTTTTGTTTTTTTGGTAGAGACGGG |
| | | GTTTCACCATATTGGCCAGGCTGGTCTCCAACTCCTAATCTCAGGTGATCTACCCACCTTGG |
| | | CCTCCCAAATTGCTGGGATTACAGGCGTGAACCACTGCTCCCTTCCCTGTCCTTATCGATGC |
| | | CTAGGGTTAATCATTAACTACAAGGAACCCCTAGTGATGGAGTTGGCCACTCCCTCTCTGCG |
| | | CGCTCGCTCGCTCACTGAGGCCGGGCGACCAAAGGTCGCCCGACGCCCGGGCTTTGCCCGGG |
| | | CGGCCTCAGTGAGCGAGCGAGCGCGCAG |
| VOYTAU50 | 5168 | CTGCGCGCTCGCTCGCTCACTGAGGCCGCCCGGGCAAAGCCCGGGCGTCGGGCGACCTTTGG |
| | | TCGCCCGGCCTCAGTGAGCGAGCGAGCGCGCAGAGAGGGAGTGTAGCCATGCTCTAGGAAGA |
| | | TCAATTCAATTCACGCGTCGACATTGATTATTGACTAGTTATTAATAGTAATCAATTACGGG |
| | | GTCATTAGTTCATAGCCCATATATGGAGTTCCGCGTTACATAACTTACGGTAAATGGCCCGC |
| | | CTGGCTGACCGCCCAACGACCCCCGCCCATTGACGTCAATAATGACGTATGTTCCCATAGTA |
| | | ACGCCAATAGGGACTTTCCATTGACGTCAATGGGTGGAGTATTTACGGTAAACTGCCCACTT |
| | | GGCAGTACATCAAGTGTATCATATGCCAAGTACGCCCCCTATTGACGTCAATGACGGTAAAT |
| | | GGCCCGCCTGGCATTATGCCCAGTACATGACCTTATGGGACTTTCCTACTTGGCAGTACATC |
| | | TACGTATTAGTCATCGCTATTACCATGTCGAGGCCACGTTCTGCTTCACTCTCCCCATCTCC |
| | | CCCCCCTCCCCACCCCCAATTTTGTATTTATTTATTTTTTAATTATTTTGTGCAGCGATGGG |
| | | GGCGGGGGGGGGGGGCGCGCGCCAGGCGGGGCGGGGCGGGGCGAGGGGCGGGGCGGGGCGAG |
| | | GCGGAGAGGTGCGGCGGCAGCCAATCAGAGCGGCGCGCTCCGAAAGTTTCCTTTTATGGCGA |
| | | GGCGGCGGCGGCGGCGGCCCTATAAAAAGCGAAGCGCGCGGCGGGCGGGAGCAAGCTTCGTT |
| | | TAGTGAACCGTCAGATCGCCTGGAGACGCCATCCACGCTGTTTTGACCTCCATAGAAGACAC |
| | | CGGGACCGATCCAGCCTCCGCGGATTCGAATCCCGGCCGGGAACGGTGCATTGGAACGCGGA |
| | | TTCCCCGTGCCAAGAGTGACGTAAGTACCGCCTATAGAGTCTATAGGCCCACAAAAAATGCT |
| | | TTCTTCTTTTAATATACTTTTTTGTTTATCTTATTTCTAATACTTTCCCTAATCTCTTTCTT |
| | | TCAGGGCAATAATGATACAATGTATCATGCCTCTTTGCACCATTCTAAAGAATAACAGTGAT |
| | | AATTTCTGGGTTAAGGCAATAGCAATATTTCTGCATATAAATATTTCTGCATATAAATTGTA |
| | | ACTGATGTAAGAGGTTTCATATTGCTAATAGCAGCTACAATCCAGCTACCATTCTGCTTTTA |
| | | TTTTATGGTTGGGATAAGGCTGGATTATTCTGAGTCCAAGCTAGGCCCTTTTGCTAATCATG |
| | | TTCATACCTCTTATCTTCCTCCCACAGCTCCTGGGCAACGTGCTGGTCTGTGTGCTGGCCCA |
| | | TCACTTTGGCAAAGAATTGGGATTCGAACCGGTGTGCTGGGCGGGGGGCGGCGGGCCCTCCC |
| | | GCAGAACACCATGCGCTCTTCGGAAGCCGTCTTCCGCCAAGAGACCTGTGACCTGGTCTCTT |
| | | GGCGGAAGACGGCTTCTGAGGAGCGCCTTGACAGCAGCCATGGGAGGGCCGCCCCCTACCTC |
| | | AGTGACTCGAGGGGTGGCATCCCTGTGACCCCTCCCCAGTGCCTCTCCTGGCCCTGGAAGTT |
| | | GCCACTCCAGTGCCCACCAGCCTTGTCCTAATAAAATTAAGTTGCATCATTTTGTCTGACTA |
| | | GGTGTCCTTCTATAATATTATGGGGTGGAGGGGGGTGGTATGGAGCAAGGGGCAAGTTGGGA |
| | | AGACAACCTGTAGGGCCTGCGGGGTCTATTGGGAACCAAGCTGGAGTGCAGTGGCACAATCT |
| | | TGGCTCACTGCAATCTCCGCCTCCTGGGTTCAAGCGATTCTCCTGCCTCAGCCTCCCGAGTT |
| | | GTTGGGATTCCAGGCATGCATGACCAGGCTCAGCTAATTTTTGTTTTTTTGGTAGAGACGGG |
| | | GTTTCACCATATTGGCCAGGCTGGTCTCCAACTCCTAATCTCAGGTGATCTACCCACCTTGG |
| | | CCTCCCAAATTGCTGGGATTACAGGCGTGAACCACTGCTCCCTTCCCTGTCCTTATCGATGC |
| | | CTAGGGTTAATCATTAACTACAAGGAACCCCTAGTGATGGAGTTGGCCACTCCCTCTCTGCG |
| | | CGCTCGCTCGCTCACTGAGGCCGGGCGACCAAAGGTCGCCCGACGCCCGGGCTTTGCCCGGG |
| | | CGGCCTCAGTGAGCGAGCGAGCGCGCAG |
| VOYTAU51 | 5169 | CTGCGCGCTCGCTCGCTCACTGAGGCCGCCCGGGCAAAGCCCGGGCGTCGGGCGACCTTTGG |
| | | TCGCCCGGCCTCAGTGAGCGAGCGAGCGCGCAGAGAGGGAGTGTAGCCATGCTCTAGGAAGA |
| | | TCAATTCAATTCACGCGTCGACATTGATTATTGACTAGTTATTAATAGTAATCAATTACGGG |
| | | GTCATTAGTTCATAGCCCATATATGGAGTTCCGCGTTACATAACTTACGGTAAATGGCCCGC |
| | | CTGGCTGACCGCCCAACGACCCCCGCCCATTGACGTCAATAATGACGTATGTTCCCATAGTA |
| | | ACGCCAATAGGGACTTTCCATTGACGTCAATGGGTGGAGTATTTACGGTAAACTGCCCACTT |
| | | GGCAGTACATCAAGTGTATCATATGCCAAGTACGCCCCCTATTGACGTCAATGACGGTAAAT |
| | | GGCCCGCCTGGCATTATGCCCAGTACATGACCTTATGGGACTTTCCTACTTGGCAGTACATC |
| | | TACGTATTAGTCATCGCTATTACCATGTCGAGGCCACGTTCTGCTTCACTCTCCCCATCTCC |
| | | CCCCCCTCCCCACCCCCAATTTTGTATTTATTTATTTTTTAATTATTTTGTGCAGCGATGGG |
| | | GGCGGGGGGGGGGGGCGCGCGCCAGGCGGGGCGGGGCGGGGCGAGGGGCGGGGCGGGGCGAG |
| | | GCGGAGAGGTGCGGCGGCAGCCAATCAGAGCGGCGCGCTCCGAAAGTTTCCTTTTATGGCGA |
| | | GGCGGCGGCGGCGGCGGCCCTATAAAAAGCGAAGCGCGCGGCGGGCGGGAGCAAGCTTCGTT |
| | | TAGTGAACCGTCAGATCGCCTGGAGACGCCATCCACGCTGTTTTGACCTCCATAGAAGACAC |
| | | CGGGACCGATCCAGCCTCCGCGGATTCGAATCCCGGCCGGGAACGGTGCATTGGAACGCGGA |
| | | TTCCCCGTGCCAAGAGTGACGTAAGTACCGCCTATAGAGTCTATAGGCCCACAAAAAATGCT |
| | | TTCTTCTTTTAATATACTTTTTTGTTTATCTTATTTCTAATACTTTCCCTAATCTCTTTCTT |
| | | TCAGGGCAATAATGATACAATGTATCATGCCTCTTTGCACCATTCTAAAGAATAACAGTGAT |
| | | AATTTCTGGGTTAAGGCAATAGCAATATTTCTGCATATAAATATTTCTGCATATAAATTGTA |
| | | ACTGATGTAAGAGGTTTCATATTGCTAATAGCAGCTACAATCCAGCTACCATTCTGCTTTTA |
| | | TTTTATGGTTGGGATAAGGCTGGATTATTCTGAGTCCAAGCTAGGCCCTTTTGCTAATCATG |
| | | TTCATACCTCTTATCTTCCTCCCACAGCTCCTGGGCAACGTGCTGGTCTGTGTGCTGGCCCA |
| | | TCACTTTGGCAAAGAATTGGGATTCGAACCGGTGTGCTGGGCGGGGGGCGGCGGGCCCTCCC |
| | | GCAGAACACCATGCGCTCTTCGGAACCTCGCAGTTCGGTTAATCCCTGTGACCTGGTATTAA |
| | | CCGAACTGCGAGGTTCTGAGGAGCGCCTTGACAGCAGCCATGGGAGGGCCGCCCCCTACCTC |
| | | AGTGACTCGAGGGGTGGCATCCCTGTGACCCCTCCCCAGTGCCTCTCCTGGCCCTGGAAGTT |
| | | GCCACTCCAGTGCCCACCAGCCTTGTCCTAATAAAATTAAGTTGCATCATTTTGTCTGACTA |
| | | GGTGTCCTTCTATAATATTATGGGGTGGAGGGGGGTGGTATGGAGCAAGGGGCAAGTTGGGA |
| | | AGACAACCTGTAGGGCCTGCGGGGTCTATTGGGAACCAAGCTGGAGTGCAGTGGCACAATCT |
| | | TGGCTCACTGCAATCTCCGCCTCCTGGGTTCAAGCGATTCTCCTGCCTCAGCCTCCCGAGTT |
| | | GTTGGGATTCCAGGCATGCATGACCAGGCTCAGCTAATTTTTGTTTTTTTGGTAGAGACGGG |
| | | GTTTCACCATATTGGCCAGGCTGGTCTCCAACTCCTAATCTCAGGTGATCTACCCACCTTGG |
| | | CCTCCCAAATTGCTGGGATTACAGGCGTGAACCACTGCTCCCTTCCCTGTCCTTATCGATGC |
| | | CTAGGGTTAATCATTAACTACAAGGAACCCCTAGTGATGGAGTTGGCCACTCCCTCTCTGCG |
| | | CGCTCGCTCGCTCACTGAGGCCGGGCGACCAAAGGTCGCCCGACGCCCGGGCTTTGCCCGGG |
| | | CGGCCTCAGTGAGCGAGCGAGCGCGCAG |
| VOYTAU52 | 5170 | CTGCGCGCTCGCTCGCTCACTGAGGCCGCCCGGGCAAAGCCCGGGCGTCGGGCGACCTTTGG |
| | | TCGCCCGGCCTCAGTGAGCGAGCGAGCGCGCAGAGAGGGAGTGTAGCCATGCTCTAGGAAGA |
| | | TCAATTCAATTCACGCGTCGACATTGATTATTGACTAGTTATTAATAGTAATCAATTACGGG |
| | | GTCATTAGTTCATAGCCCATATATGGAGTTCCGCGTTACATAACTTACGGTAAATGGCCCGC |
| | | CTGGCTGACCGCCCAACGACCCCCGCCCATTGACGTCAATAATGACGTATGTTCCCATAGTA |
| | | ACGCCAATAGGGACTTTCCATTGACGTCAATGGGTGGAGTATTTACGGTAAACTGCCCACTT |
| | | GGCAGTACATCAAGTGTATCATATGCCAAGTACGCCCCCTATTGACGTCAATGACGGTAAAT |
| | | GGCCCGCCTGGCATTATGCCCAGTACATGACCTTATGGGACTTTCCTACTTGGCAGTACATC |
| | | TACGTATTAGTCATCGCTATTACCATGTCGAGGCCACGTTCTGCTTCACTCTCCCCATCTCC |
| | | CCCCCCTCCCCACCCCCAATTTTGTATTTATTTATTTTTTAATTATTTTGTGCAGCGATGGG |
| | | GGCGGGGGGGGGGGGCGCGCGCCAGGCGGGGCGGGGCGGGGCGAGGGGCGGGGCGGGGCGAG |
| | | GCGGAGAGGTGCGGCGGCAGCCAATCAGAGCGGCGCGCTCCGAAAGTTTCCTTTTATGGCGA |
| | | GGCGGCGGCGGCGGCGGCCCTATAAAAAGCGAAGCGCGCGGCGGGCGGGAGCAAGCTTCGTT |
| | | TAGTGAACCGTCAGATCGCCTGGAGACGCCATCCACGCTGTTTTGACCTCCATAGAAGACAC |
| | | CGGGACCGATCCAGCCTCCGCGGATTCGAATCCCGGCCGGGAACGGTGCATTGGAACGCGGA |
| | | TTCCCCGTGCCAAGAGTGACGTAAGTACCGCCTATAGAGTCTATAGGCCCACAAAAAATGCT |
| | | TTCTTCTTTTAATATACTTTTTTGTTTATCTTATTTCTAATACTTTCCCTAATCTCTTTCTT |
| | | TCAGGGCAATAATGATACAATGTATCATGCCTCTTTGCACCATTCTAAAGAATAACAGTGAT |
| | | AATTTCTGGGTTAAGGCAATAGCAATATTTCTGCATATAAATATTTCTGCATATAAATTGTA |
| | | ACTGATGTAAGAGGTTTCATATTGCTAATAGCAGCTACAATCCAGCTACCATTCTGCTTTTA |
| | | TTTTATGGTTGGGATAAGGCTGGATTATTCTGAGTCCAAGCTAGGCCCTTTTGCTAATCATG |
| | | TTCATACCTCTTATCTTCCTCCCACAGCTCCTGGGCAACGTGCTGGTCTGTGTGCTGGCCCA |
| | | TCACTTTGGCAAAGAATTGGGATTCGAACCGGTGTGCTGGGCGGGGGGCGGCGGGCCCTCCC |
| | | GCAGAACACCATGCGCTCTTCGGAAGCTTTGGCTCGGGACTTCCCCTGTGACCTGGTGAAGT |
| | | CCCGAGCCAAAGCTTCTGAGGAGCGCCTTGACAGCAGCCATGGGAGGGCCGCCCCCTACCTC |
| | | AGTGACTCGAGGGGTGGCATCCCTGTGACCCCTCCCCAGTGCCTCTCCTGGCCCTGGAAGTT |
| | | GCCACTCCAGTGCCCACCAGCCTTGTCCTAATAAAATTAAGTTGCATCATTTTGTCTGACTA |
| | | GGTGTCCTTCTATAATATTATGGGGTGGAGGGGGGTGGTATGGAGCAAGGGGCAAGTTGGGA |
| | | AGACAACCTGTAGGGCCTGCGGGGTCTATTGGGAACCAAGCTGGAGTGCAGTGGCACAATCT |
| | | TGGCTCACTGCAATCTCCGCCTCCTGGGTTCAAGCGATTCTCCTGCCTCAGCCTCCCGAGTT |
| | | GTTGGGATTCCAGGCATGCATGACCAGGCTCAGCTAATTTTTGTTTTTTTGGTAGAGACGGG |
| | | GTTTCACCATATTGGCCAGGCTGGTCTCCAACTCCTAATCTCAGGTGATCTACCCACCTTGG |
| | | CCTCCCAAATTGCTGGGATTACAGGCGTGAACCACTGCTCCCTTCCCTGTCCTTATCGATGC |
| | | CTAGGGTTAATCATTAACTACAAGGAACCCCTAGTGATGGAGTTGGCCACTCCCTCTCTGCG |
| | | CGCTCGCTCGCTCACTGAGGCCGGGCGACCAAAGGTCGCCCGACGCCCGGGCTTTGCCCGGG |
| | | CGGCCTCAGTGAGCGAGCGAGCGCGCAG |
| VOYTAU53 | 5171 | CTGCGCGCTCGCTCGCTCACTGAGGCCGCCCGGGCAAAGCCCGGGCGTCGGGCGACCTTTGG |
| | | TCGCCCGGCCTCAGTGAGCGAGCGAGCGCGCAGAGAGGGAGTGTAGCCATGCTCTAGGAAGA |
| | | TCAATTCAATTCACGCGTCGACATTGATTATTGACTAGTTATTAATAGTAATCAATTACGGG |
| | | GTCATTAGTTCATAGCCCATATATGGAGTTCCGCGTTACATAACTTACGGTAAATGGCCCGC |
| | | CTGGCTGACCGCCCAACGACCCCCGCCCATTGACGTCAATAATGACGTATGTTCCCATAGTA |
| | | ACGCCAATAGGGACTTTCCATTGACGTCAATGGGTGGAGTATTTACGGTAAACTGCCCACTT |
| | | GGCAGTACATCAAGTGTATCATATGCCAAGTACGCCCCCTATTGACGTCAATGACGGTAAAT |
| | | GGCCCGCCTGGCATTATGCCCAGTACATGACCTTATGGGACTTTCCTACTTGGCAGTACATC |
| | | TACGTATTAGTCATCGCTATTACCATGTCGAGGCCACGTTCTGCTTCACTCTCCCCATCTCC |
| | | CCCCCCTCCCCACCCCCAATTTTGTATTTATTTATTTTTTAATTATTTTGTGCAGCGATGGG |
| | | GGCGGGGGGGGGGGGCGCGCGCCAGGCGGGGCGGGGCGGGGCGAGGGGGGGGGCGGGGCGAG |
| | | GCGGAGAGGTGCGGCGGCAGCCAATCAGAGCGGCGCGCTCCGAAAGTTTCCTTTTATGGCGA |
| | | GGCGGCGGCGGCGGCGGCCCTATAAAAAGCGAAGCGCGCGGCGGGGGGGAGCAAGCTTCGTT |
| | | TAGTGAACCGTCAGATCGCCTGGAGACGCCATCCACGCTGTTTTGACCTCCATAGAAGACAC |
| | | CGGGACCGATCCAGCCTCCGCGGATTCGAATCCCGGCCGGGAACGGTGCATTGGAACGCGGA |
| | | TTCCCCGTGCCAAGAGTGACGTAAGTACCGCCTATAGAGTCTATAGGCCCACAAAAAATGCT |
| | | TTCTTCTTTTAATATACTTTTTTGTTTATCTTATTTCTAATACTTTCCCTAATCTCTTTCTT |
| | | TCAGGGCAATAATGATACAATGTATCATGCCTCTTTGCACCATTCTAAAGAATAACAGTGAT |
| | | AATTTCTGGGTTAAGGCAATAGCAATATTTCTGCATATAAATATTTCTGCATATAAATTGTA |
| | | ACTGATGTAAGAGGTTTCATATTGCTAATAGCAGCTACAATCCAGCTACCATTCTGCTTTTA |
| | | TTTTATGGTTGGGATAAGGCTGGATTATTCTGAGTCCAAGCTAGGCCCTTTTGCTAATCATG |
| | | TTCATACCTCTTATCTTCCTCCCACAGCTCCTGGGCAACGTGCTGGTCTGTGTGCTGGCCCA |
| | | TCACTTTGGCAAAGAATTGGGATTCGAACCGGTGTGCTGGGCGGGGGGCGGCGGGCCCTCCC |
| | | GCAGAACACCATGCGCTCTTCGGAAAGCTGACCTTCCGCGAGACCCTGTGACCTGGTTCTCG |
| | | CGGAAGGTCAGCTTTCTGAGGAGCGCCTTGACAGCAGCCATGGGAGGGCCGCCCCCTACCTC |
| | | AGTGACTCGAGGGGTGGCATCCCTGTGACCCCTCCCCAGTGCCTCTCCTGGCCCTGGAAGTT |
| | | GCCACTCCAGTGCCCACCAGCCTTGTCCTAATAAAATTAAGTTGCATCATTTTGTCTGACTA |
| | | GGTGTCCTTCTATAATATTATGGGGTGGAGGGGGGTGGTATGGAGCAAGGGGCAAGTTGGGA |
| | | AGACAACCTGTAGGGCCTGCGGGGTCTATTGGGAACCAAGCTGGAGTGCAGTGGCACAATCT |
| | | TGGCTCACTGCAATCTCCGCCTCCTGGGTTCAAGCGATTCTCCTGCCTCAGCCTCCCGAGTT |
| | | GTTGGGATTCCAGGCATGCATGACCAGGCTCAGCTAATTTTTGTTTTTTTGGTAGAGACGGG |
| | | GTTTCACCATATTGGCCAGGCTGGTCTCCAACTCCTAATCTCAGGTGATCTACCCACCTTGG |
| | | CCTCCCAAATTGCTGGGATTACAGGCGTGAACCACTGCTCCCTTCCCTGTCCTTATCGATGC |
| | | CTAGGGTTAATCATTAACTACAAGGAACCCCTAGTGATGGAGTTGGCCACTCCCTCTCTGCG |
| | | CGCTCGCTCGCTCACTGAGGCCGGGCGACCAAAGGTCGCCCGACGCCCGGGCTTTGCCCGGG |
| | | CGGCCTCAGTGAGCGAGCGAGCGCGCAG |
| VOYTAU54 | 5172 | CTGCGCGCTCGCTCGCTCACTGAGGCCGCCCGGGCAAAGCCCGGGCGTCGGGCGACCTTTGG |
| | | TCGCCCGGCCTCAGTGAGCGAGCGAGCGCGCAGAGAGGGAGTGTAGCCATGCTCTAGGAAGA |
| | | TCAATTCAATTCACGCGTCGACATTGATTATTGACTAGTTATTAATAGTAATCAATTACGGG |
| | | GTCATTAGTTCATAGCCCATATATGGAGTTCCGCGTTACATAACTTACGGTAAATGGCCCGC |
| | | CTGGCTGACCGCCCAACGACCCCCGCCCATTGACGTCAATAATGACGTATGTTCCCATAGTA |
| | | ACGCCAATAGGGACTTTCCATTGACGTCAATGGGTGGAGTATTTACGGTAAACTGCCCACTT |
| | | GGCAGTACATCAAGTGTATCATATGCCAAGTACGCCCCCTATTGACGTCAATGACGGTAAAT |
| | | GGCCCGCCTGGCATTATGCCCAGTACATGACCTTATGGGACTTTCCTACTTGGCAGTACATC |
| | | TACGTATTAGTCATCGCTATTACCATGTCGAGGCCACGTTCTGCTTCACTCTCCCCATCTCC |
| | | CCCCCCTCCCCACCCCCAATTTTGTATTTATTTATTTTTTAATTATTTTGTGCAGCGATGGG |
| | | GGCGGGGGGGGGGGGCGCGCGCCAGGCGGGGCGGGGCGGGGCGAGGGGCGGGGCGGGGCGAG |
| | | GCGGAGAGGTGCGGCGGCAGCCAATCAGAGCGGCGCGCTCCGAAAGTTTCCTTTTATGGCGA |
| | | GGCGGCGGCGGCGGCGGCCCTATAAAAAGCGAAGCGCGCGGCGGGCGGGAGCAAGCTTCGTT |
| | | TAGTGAACCGTCAGATCGCCTGGAGACGCCATCCACGCTGTTTTGACCTCCATAGAAGACAC |
| | | CGGGACCGATCCAGCCTCCGCGGATTCGAATCCCGGCCGGGAACGGTGCATTGGAACGCGGA |
| | | TTCCCCGTGCCAAGAGTGACGTAAGTACCGCCTATAGAGTCTATAGGCCCACAAAAAATGCT |
| | | TTCTTCTTTTAATATACTTTTTTGTTTATCTTATTTCTAATACTTTCCCTAATCTCTTTCTT |
| | | TCAGGGCAATAATGATACAATGTATCATGCCTCTTTGCACCATTCTAAAGAATAACAGTGAT |
| | | AATTTCTGGGTTAAGGCAATAGCAATATTTCTGCATATAAATATTTCTGCATATAAATTGTA |
| | | ACTGATGTAAGAGGTTTCATATTGCTAATAGCAGCTACAATCCAGCTACCATTCTGCTTTTA |
| | | TTTTATGGTTGGGATAAGGCTGGATTATTCTGAGTCCAAGCTAGGCCCTTTTGCTAATCATG |
| | | TTCATACCTCTTATCTTCCTCCCACAGCTCCTGGGCAACGTGCTGGTCTGTGTGCTGGCCCA |
| | | TCACTTTGGCAAAGAATTGGGATTCGAACCGGTGTGCTGGGCGGGGGGCGGCGGGCCCTCCC |
| | | GCAGAACACCATGCGCTCTTCGGAAGCCGTCTTCCGCCAAGAGCCCTGTGACCTGGTCTCTT |
| | | GGCGGAAGACGGCTTCTGAGGAGCGCCTTGACAGCAGCCATGGGAGGGCCGCCCCCTACCTC |
| | | AGTGACTCGAGGGGTGGCATCCCTGTGACCCCTCCCCAGTGCCTCTCCTGGCCCTGGAAGTT |
| | | GCCACTCCAGTGCCCACCAGCCTTGTCCTAATAAAATTAAGTTGCATCATTTTGTCTGACTA |
| | | GGTGTCCTTCTATAATATTATGGGGTGGAGGGGGGTGGTATGGAGCAAGGGGCAAGTTGGGA |
| | | AGACAACCTGTAGGGCCTGCGGGGTCTATTGGGAACCAAGCTGGAGTGCAGTGGCACAATCT |
| | | TGGCTCACTGCAATCTCCGCCTCCTGGGTTCAAGCGATTCTCCTGCCTCAGCCTCCCGAGTT |
| | | GTTGGGATTCCAGGCATGCATGACCAGGCTCAGCTAATTTTTGTTTTTTTGGTAGAGACGGG |
| | | GTTTCACCATATTGGCCAGGCTGGTCTCCAACTCCTAATCTCAGGTGATCTACCCACCTTGG |
| | | CCTCCCAAATTGCTGGGATTACAGGCGTGAACCACTGCTCCCTTCCCTGTCCTTATCGATGC |
| | | CTAGGGTTAATCATTAACTACAAGGAACCCCTAGTGATGGAGTTGGCCACTCCCTCTCTGCG |
| | | CGCTCGCTCGCTCACTGAGGCCGGGCGACCAAAGGTCGCCCGACGCCCGGGCTTTGCCCGGG |
| | | CGGCCTCAGTGAGCAGCGAGCGCGCAG |

TABLE 10C
Exemplary Sequences of AAV Viral Genomes Components

| | SEQ | |
|---|---|---|
| | ID | |
| Name | NO | Sequence |
| ITR | 5197 | CTGCGCGCTCGCTCGCTCACTGAGGCCGCCCGGGCAAAGCCCGGGCGTCGGGCGACCTTTG |
| | | GTCGCCCGGCCTCAGTGAGCGAGCGAGCGCGCAGAGAGGGAGTG |
| ITR | 5200 | AGGAACCCCTAGTGATGGAGTTGGCCACTCCCTCTCTGCGCGCTCGCTCGCTCACTGAGGC |
| | | CGGGCGACCAAAGGTCGCCCGACGCCCGGGCTTTGCCCGGGCGGCCTCAGTGAGCGAGCGA |
| | | GCGCGCAG |
| ITR | 4469 | CCTGCAGGCAGCTGCGCGCTCGCTCGCTCACTGAGGCCGCCCGGGCAAAGCCCGGGCGTCG |
| | | GGCGACCTTTGGTCGCCCGGCCTCAGTGAGCGAGCGAGCGCGCAGAGAGGGAGTGGCCAAC |
| | | TCCATCACTAGGGGTTCCT |
| ITR | 4470 | AGGAACCCCTAGTGATGGAGTTGGCCACTCCCTCTCTGCGCGCTCGCTCGCTCACTGAGGC |
| | | CGGGCGACCAAAGGTCGCCCGACGCCCGGGCTTTGCCCGGGCGGCCTCAGTGAGCGAGCGA |
| | | GCGCGCAGCTGCCTGCAGG |
| CMVie (v1) | 4472 | CGCGTCGACATTGATTATTGACTAGTTATTAATAGTAATCAATTACGGGGTCATTAGTTCA |
| | | TAGCCCATATATGGAGTTCCGCGTTACATAACTTACGGTAAATGGCCCGCCTGGCTGACCG |
| | | CCCAACGACCCCCGCCCATTGACGTCAATAATGACGTATGTTCCCATAGTAACGCCAATAG |
| | | GGACTTTCCATTGACGTCAATGGGTGGAGTATTTACGGTAAACTGCCCACTTGGCAGTACA |
| | | TCAAGTGTATCATATGCCAAGTACGCCCCCTATTGACGTCAATGACGGTAAATGGCCCGCC |
| | | TGGCATTATGCCCAGTACATGACCTTATGGGACTTTCCTACTTGGCAGTACATCTACGTAT |
| | | TAGTCATCGCTATTAC |
| CMVie (v2) | 4471 | GACATTGATTATTGACTAGTTATTAATAGTAATCAATTACGGGGTCATTAGTTCATAGCCC |
| | | ATATATGGAGTTCCGCGTTACATAACTTACGGTAAATGGCCCGCCTGGCTGACCGCCCAAC |
| | | GACCCCCGCCCATTGACGTCAATAATGACGTATGTTCCCATAGTAACGCCAATAGGGACTT |
| | | TCCATTGACGTCAATGGGTGGAGTATTTACGGTAAACTGCCCACTTGGCAGTACATCAAGT |
| | | GTATCATATGCCAAGTACGCCCCCTATTGACGTCAATGACGGTAAATGGCCCGCCTGGCAT |
| | | TATGCCCAGTACATGACCTTATGGGACTTTCCTACTTGGCAGTACATCTACGTATTAGTCA |
| | | TCGCTATTACCATG |
| CMVie | 4473 | CGACATTGATTATTGACTAGTTATTAATAGTAATCAATTACGGGGTCATTAGTTCATAGCC |
| Enhancer- | | CATATATGGAGTTCCGCGTTACATAACTTACGGTAAATGGCCCGCCTGGCTGACCGCCCAA |
| CBA | | CGACCCCCGCCCATTGACGTCAATAATGACGTATGTTCCCATAGTAACGCCAATAGGGACT |
| Promoter (v1) | | TTCCATTGACGTCAATGGGTGGAGTATTTACGGTAAACTGCCCACTTGGCAGTACATCAAG |
| | | TGTATCATATGCCAAGTACGCCCCCTATTGACGTCAATGACGGTAAATGGCCCGCCTGGCA |
| | | TTATGCCCAGTACATGACCTTATGGGACTTTCCTACTTGGCAGTACATCTACGTATTAGTC |
| | | ATCGCTATTACCATGTCGAGGCCACGTTCTGCTTCACTCTCCCCATCTCCCCCCCCTCCCC |
| | | ACCCCCAATTTTGTATTTATTTATTTTTTAATTATTTTGTGCAGCGATGGGGGGGGGGGGG |
| | | GGGGGCGCGCGCCAGGCGGGGCGGGGCGGGGCGAGGGGCGGGGCGGGGCGAGGCGGAGAGG |
| | | TGCGGCGGCAGCCAATCAGAGCGGCGCGCTCCGAAAGTTTCCTTTTATGGCGAGGCGGCGG |
| | | CGGCGGCGGCCCTATAAAAAGCGAAGCGCGCGGCGGGCGGGAGC |
| CBA | 5199 | CCACGTTCTGCTTCACTCTCCCCATCTCCCCCCCCTCCCCACCCCCAATTTTGTATTTATT |
| Promoter | | TATTTTTTAATTATTTTGTGCAGCGATGGGGGCGGGGGGGGGGGGCGCGCGCCAGGCGGGG |
| | | CGGGGCGGGGCGAGGGGCGGGGCGGGGCGAGGCGGAGAGGTGCGGCGGCAGCCAATCAGAG |
| | | CGGCGCGCTCCGAAAGTTTCCTTTTATGGCGAGGGGGGGGCGGCGGCGGCCCTATAAAAAG |
| | | CGAAGCGCGCGGCGGGCGGGAGC |
| CMVie | 4474 | CGCGTCGACATTGATTATTGACTAGTTATTAATAGTAATCAATTACGGGGTCATTAGTTCA |
| Enhancer- | | TAGCCCATATATGGAGTTCCGCGTTACATAACTTACGGTAAATGGCCCGCCTGGCTGACCG |
| CBA | | CCCAACGACCCCCGCCCATTGACGTCAATAATGACGTATGTTCCCATAGTAACGCCAATAG |
| Promoter (v2) | | GGACTTTCCATTGACGTCAATGGGTGGAGTATTTACGGTAAACTGCCCACTTGGCAGTACA |
| | | TCAAGTGTATCATATGCCAAGTACGCCCCCTATTGACGTCAATGACGGTAAATGGCCCGCC |
| | | TGGCATTATGCCCAGTACATGACCTTATGGGACTTTCCTACTTGGCAGTACATCTACGTAT |
| | | TAGTCATCGCTATTACCATGTCGAGGCCACGTTCTGCTTCACTCTCCCCATCTCCCCCCCC |
| | | TCCCCACCCCCAATTTTGTATTTATTTATTTTTTAATTATTTTGTGCAGCGATGGGGGGGG |
| | | GGGGGGGGGGGGCGCGCCAGGCGGGGCGGGGGGGGGCGAGGGGGGGGGGGGGGCGAGGCGG |
| | | AGAGGTGCGGCGGCAGCCAATCAGAGCGGCGCGCTCCGAAAGTTTCCTTTTATGGCGAGGC |
| | | GGCGGCGGCGGCGGCCCTATAAAAAGCGAAGCGCGCGGCGGGGGGAGC |
| hBG Intron | 4475 | TCAGATCGCCTGGAGACGCCATCCACGCTGTTTTGACCTCCATAGAAGACACCGGGACCGA |
| | | TCCAGCCTCCGCGGATTCGAATCCCGGCCGGGAACGGTGCATTGGAACGCGGATTCCCCGT |
| | | GCCAAGAGTGACGTAAGTACCGCCTATAGAGTCTATAGGCCCACAAAAAATGCTTTCTTCT |
| | | TTTAATATACTTTTTTGTTTATCTTATTTCTAATACTTTCCCTAATCTCTTTCTTTCAGGG |
| | | CAATAATGATACAATGTATCATGCCTCTTTGCACCATTCTAAAGAATAACAGTGATAATTT |
| | | CTGGGTTAAGGCAATAGCAATATTTCTGCATATAAATATTTCTGCATATAAATTGTAACTG |
| | | ATGTAAGAGGTTTCATATTGCTAATAGCAGCTACAATCCAGCTACCATTCTGCTTTTATTT |
| | | TATGGTTGGGATAAGGCTGGATTATTCTGAGTCCAAGCTAGGCCCTTTTGCTAATCATGTT |
| | | CATACCTCTTATCTTCCTCCCACAGCTCCTGGGCAACGTGCTGGTCTGTGTGCTGGCCCAT |
| | | CACTTTGGCAAAGAATT |
| hGH PolyA | 4476 | GGGTGGCATCCCTGTGACCCCTCCCCAGTGCCTCTCCTGGCCCTGGAAGTTGCCACTCCAG |
| | | TGCCCACCAGCCTTGTCCTAATAAAATTAAGTTGCATCATTTTGTCTGACTAGGTGTCCTT |
| | | CTATAATATTATGGGGTGGAGGGGGGTGGTATGGAGCAAGGGGCAAGTTGGGAAGACAACC |
| | | TGTAGGGCCTGCGGGGTCTATTGGGAACCAAGCTGGAGTGCAGTGGCACAATCTTGGCTCA |
| | | CTGCAATCTCCGCCTCCTGGGTTCAAGCGATTCTCCTGCCTCAGCCTCCCGAGTTGTTGGG |
| | | ATTCCAGGCATGCATGACCAGGCTCAGCTAATTTTTGTTTTTTTGGTAGAGACGGGGTTTC |
| | | ACCATATTGGCCAGGCTGGTCTCCAACTCCTAATCTCAGGTGATCTACCCACCTTGGCCTC |
| | | CCAAATTGCTGGGATTACAGGCGTGAACCACTGCTCCCTTCCCTGTCCTT |

[0741] In some embodiments, the a viral genome described herein comprises the nucleotide sequence of any one of SEQ ID NOs: 4439-4468 or 5149-5196, or a nucleotide sequence at least 70%, 75%, 80%, 85%, 90%, 95%, 99% or 100% identical to any one of SEQ ID NOs: 4439-4468 or 5149-5196. In some embodiments, the viral genome comprises the nucleotide sequence of any one of SEQ ID NOs: 4439-4468 or 5149-5196, or a nucleotide sequence at least 80% identical to any one of SEQ ID NOs: 4439-4468 or 5149-5196. In some embodiments, the viral genome comprises the nucleotide sequence of any one of SEQ ID NOs: 4439-4468 or 5149-5196, or a nucleotide sequence at least 85% identical to any one of SEQ ID NOs: 4439-4468 or 5149-5196. In some embodiments, the viral genome comprises the nucleotide sequence of any one of SEQ ID NOs: 4439-4468 or 5149-5196, or a nucleotide sequence at least 90% identical to any one of SEQ ID NOs: 4439-4468 or 5149-5196. In some embodiments, the viral genome comprises the nucleotide sequence of any one of SEQ ID NOs: 4439-4468 or 5149-5196, or a nucleotide sequence at least 95% identical to any one of SEQ ID NOs: 4439-4468 or 5149-5196. In some embodiments, the viral genome comprises the nucleotide sequence of any one of SEQ ID NOs: 4439-4468 or 5149-5196, or a nucleotide sequence at least 99% identical to any one of SEQ ID NOs: 4439-4468 or 5149-5196.

[0742] In some embodiments, the AAV viral genome comprises the nucleotide sequence of SEQ ID NO: 5173, or a nucleotide sequence at least 70%, 75%, 80%, 85%, 90%, 92%, 95%, 96%, 97%, 98%, or 99% identical thereto. In some embodiments, the AAV viral genome comprises the nucleotide sequence of SEQ ID NO: 5173, or a nucleotide sequence having at least one, two or three, but not more than 30, 20 or 10 different nucleotides relative to the nucleotide sequence of SEQ ID NO: 5173. In some embodiments, the AAV viral genome comprises the nucleotide sequence of SEQ ID NO: 5173.

[0743] In some embodiments, the AAV viral genome comprises the nucleotide sequence of SEQ ID NO: 5195, or a nucleotide sequence at least 70%, 75%, 80%, 85%, 90%, 92%, 95%, 96%, 97%, 98%, or 99% identical thereto. In some embodiments, the AAV viral genome comprises the nucleotide sequence of SEQ ID NO: 5195, or a nucleotide sequence having at least one, two or three, but not more than 30, 20 or 10 different nucleotides relative to the nucleotide sequence of SEQ ID NO: 5195. In some embodiments, the AAV viral genome comprises the nucleotide sequence of SEQ ID NO: 5195.

[0744] In some embodiments, the AAV viral genome comprises the nucleotide sequence of SEQ ID NO: 5195, or a nucleotide sequence at least 70%, 75%, 80%, 85%, 90%, 92%, 95%, 96%, 97%, 98%, or 99% identical thereto. In some embodiments, the AAV viral genome comprises the nucleotide sequence of SEQ ID NO: 5196, or a nucleotide sequence having at least one, two or three, but not more than 30, 20 or 10 different nucleotides relative to the nucleotide sequence of SEQ ID NO: 5196. In some embodiments, the AAV viral genome comprises the nucleotide sequence of SEQ ID NO: 5196.

[0745] In some embodiments, the AAV viral genome comprises the nucleotide sequence of SEQ ID NO: 5182, or a nucleotide sequence at least 70%, 75%, 80%, 85%, 90%, 92%, 95%, 96%, 97%, 98%, or 99% identical thereto. In some embodiments, the AAV viral genome comprises the nucleotide sequence of SEQ ID NO: 5182, or a nucleotide sequence having at least one, two or three, but not more than 30, 20 or 10 different nucleotides relative to the nucleotide sequence of SEQ ID NO: 5182. In some embodiments, the AAV viral genome comprises the nucleotide sequence of SEQ ID NO: 5182.

[0746] In some embodiments, the AAV viral genome comprises the nucleotide sequence of SEQ ID NO: 5183, or a nucleotide sequence at least 70%, 75%, 80%, 85%, 90%, 92%, 95%, 96%, 97%, 98%, or 99% identical thereto. In some embodiments, the AAV viral genome comprises the nucleotide sequence of SEQ ID NO: 5183, or a nucleotide sequence having at least one, two or three, but not more than 30, 20 or 10 different nucleotides relative to the nucleotide sequence of SEQ ID NO: 5183. In some embodiments, the AAV viral genome comprises the nucleotide sequence of SEQ ID NO: 5183.

[0747] In some embodiments, the AAV viral genome comprises the nucleotide sequence of SEQ ID NO: 5184, or a nucleotide sequence at least 70%, 75%, 80%, 85%, 90%, 92%, 95%, 96%, 97%, 98%, or 99% identical thereto. In some embodiments, the AAV viral genome comprises the nucleotide sequence of SEQ ID NO: 5184, or a nucleotide sequence having at least one, two or three, but not more than 30, 20 or 10 different nucleotides relative to the nucleotide sequence of SEQ ID NO: 5184. In some embodiments, the AAV viral genome comprises the nucleotide sequence of SEQ ID NO: 5184.

[0748] In some embodiments, the AAV viral genome comprises the nucleotide sequence of SEQ ID NO: 5185, or a nucleotide sequence at least 70%, 75%, 80%, 85%, 90%, 92%, 95%, 96%, 97%, 98%, or 99% identical thereto. In some embodiments, the AAV viral genome comprises the nucleotide sequence of SEQ ID NO: 5185, or a nucleotide sequence having at least one, two or three, but not more than 30, 20 or 10 different nucleotides relative to the nucleotide sequence of SEQ ID NO: 5185. In some embodiments, the AAV viral genome comprises the nucleotide sequence of SEQ ID NO: 5185.

[0749] In some embodiments, the viral genome may comprise at least one inverted terminal repeat (ITR) region. In some embodiments, the AAV particle viral genome may comprise two inverted terminal repeat (ITR) regions, e.g., a 5′ ITR region (e.g., an ITR region present 5′ relative to the encoded modulatory polynucleotide) and a 3′ ITR region (e.g., an ITR region present 3′ relative to the encoded modulatory polynucleotide). In some embodiments, the ITR region comprises the nucleotide sequence of SEQ ID NO: 4469, 4470, 5197, or 5200; a nucleotide sequence at least 70%, 75%, 80%, 85%, 90%, 95%, or 99% identical to the nucleotide sequence of SEQ ID NO: 4469, 4470, 5197, or 5200; a nucleotide sequence comprising one, two, three, but no more than four different nucleotides relative to SEQ ID NO: 4469, 4470, 5197, or 5200; or a nucleotide sequence comprising one, two, three, but no more than four modifications relative to SEQ ID NO: 4469, 4470, 5197, or 5200. In some embodiments, the 5′ ITR region comprises the nucleotide sequence of SEQ ID NO: 4469; a nucleotide sequence at least 70%, 75%, 80%, 85%, 90%, 95%, or 99% identical to the nucleotide sequence of SEQ ID NO: 4469; a nucleotide sequence comprising one, two, three, but no more than four different nucleotides relative to SEQ ID NO: 4469; or a nucleotide sequence comprising one, two, three, but no more than four modifications relative to SEQ ID NO: 4469. In some embodiments, the 3′ ITR comprises the nucleotide sequence of SEQ ID NO: 4470; a nucleotide sequence at least 70%, 75%, 80%, 85%, 90%, 95%, or 99% identical to the nucleotide sequence of SEQ ID NO: 4470; a nucleotide sequence comprising one, two, three, but no more than four different nucleotides relative to SEQ ID NO: 4470; or a nucleotide sequence comprising one, two, three, but no more than four modifications relative to SEQ ID NO: 4470. In some embodiments, the 5′ ITR region comprises the nucleotide sequence of SEQ ID NO: 5197; a nucleotide sequence at least 70%, 75%, 80%, 85%, 90%, 95%, or 99% identical to the nucleotide sequence of SEQ ID NO: 5197; a nucleotide sequence comprising one, two, three, but no more than four different nucleotides relative to SEQ ID NO: 5197; or a nucleotide sequence comprising one, two, three, but no more than four modifications relative to SEQ ID NO: 5197. In some embodiments, the 3′ ITR comprises the nucleotide sequence of SEQ ID NO: 5200; a nucleotide sequence at least 70%, 75%, 80%, 85%, 90%, 95%, or 99% identical to the nucleotide sequence of SEQ ID NO: 5200; a nucleotide sequence comprising one, two, three, but no more than four different nucleotides relative to SEQ ID NO: 5200; or a nucleotide sequence comprising one, two, three, but no more than four modifications relative to SEQ ID NO: 5200.

[0750] In some embodiments, the viral genome comprises an enhancer. In some embodiments, the enhancer region is a cytomegalovirus major immediate-early enhancer region (CMVie) enhancer. In some embodiments, the enhancer comprises the nucleotide sequence of SEQ ID NO: 4471; a nucleotide sequence at least 70%, 75%, 80%, 85%, 90%, 95%, or 99% identical to the nucleotide sequence of SEQ ID NO: 4471; a nucleotide sequence comprising one, two, three, but no more than four different nucleotides relative to SEQ ID NO: 4471; or a nucleotide sequence comprising one, two, three, but no more than four modifications relative to SEQ ID NO: 4471. In some embodiments, the enhancer comprises the nucleotide sequence of SEQ ID NO: 4472; a nucleotide sequence at least 70%, 75%, 80%, 85%, 90%, 95%, or 99% identical to the nucleotide sequence of SEQ ID NO: 4472; a nucleotide sequence comprising one, two, three, but no more than four different nucleotides relative to SEQ ID NO: 4472; or a nucleotide sequence comprising one, two, three, but no more than four modifications relative to SEQ ID NO: 4472.

[0751] In some embodiments, the viral genome comprises a promoter. In some embodiments, the promoter is a tissue specific promoter. In some embodiments, the promoter is a ubiquitous promoter. In some embodiments, the promoter comprises the nucleotide sequence of SEQ ID NO: 5199; a nucleotide sequence at least 70%, 75%, 80%, 85%, 90%, 95%, or 99% identical to the nucleotide sequence of SEQ ID NO: 5199; a nucleotide sequence comprising one, two, three, but no more than four different nucleotides relative to SEQ ID NO: 5199; or a nucleotide sequence comprising one, two, three, but no more than four modifications relative to SEQ ID NO: 5199.

[0752] In some embodiments, the viral genome comprises a promoter and enhancer, wherein the promoter and enhancer region comprises the nucleotide sequence of SEQ ID NO: 4474 or 4473; a nucleotide sequence at least 70%, 75%, 80%, 85%, 90%, 95%, or 99% identical to the nucleotide sequence of SEQ ID NO: 4474 or 4473; a nucleotide sequence comprising one, two, three, but no more than four different nucleotides relative to SEQ ID NO: 4474 or 4473; or a nucleotide sequence comprising one, two, three, but no more than four modifications relative to SEQ ID NO: 4474 or 4473.

[0753] In some embodiments, the viral genome comprises an intron. In some embodiments, the intron comprises the nucleotide sequence of SEQ ID NO: 4475; a nucleotide sequence at least 70%, 75%, 80%, 85%, 90%, 95%, or 99% identical to the nucleotide sequence of SEQ ID NO: 4475; a nucleotide sequence comprising one, two, three, but no more than four different nucleotides relative to SEQ ID NO: 4475; or a nucleotide sequence comprising one, two, three, but no more than four modifications relative to SEQ ID NO: 4475.

[0754] In some embodiments, the viral genome comprises a polyadenylation (polyA) signal sequence region. In some embodiments, the polyA signal sequence region comprises the nucleotide sequence of SEQ ID NO: 4476; a nucleotide sequence at least 70%, 75%, 80%, 85%, 90%, 95%, or 99% identical to the nucleotide sequence of SEQ ID NO: 4476; a nucleotide sequence comprising one, two, three, but no more than four different nucleotides relative to SEQ ID NO: 4476; or a nucleotide sequence comprising one, two, three, but no more than four modifications relative to SEQ ID NO: 4476.

[0755] In some embodiments, the viral genome comprises at least one ITR region (e.g., two ITR regions), an enhancer, a promoter sequence region, an intron, a modulatory polynucleotide, and a polyadenylation signal sequence region, e.g., as provided in Table 10C.

[0756] In some embodiments, the AAV particle viral genome comprises a 5′ ITR region, a 3′ ITR region, a CMV enhancer sequence, a CBA promoter sequence, an hBG intron, a modulatory polynucleotide, and a human growth hormone (hGH) polyA signal sequence region. In some embodiments, the viral genome comprises in 5′ to 3′ order: a 5′ ITR, an enhancer (e.g., a CMVie enhancer or variant thereof), a promoter (e.g., a ubiquitous promoter, e.g., a CBA promoter or variant thereof), an intron (e.g., an hBG intron or variant thereof), a modulatory polynucleotide (e.g., a modulatory polynucleotide encoding an siRNA for targeting MAPT described herein, e.g., a modulatory polynucleotide as provided in Tables 9A and 9B or a variant thereof), a polyA signal sequence region (e.g., a hGH polyA signal sequence region or variant thereof), and a 3′ ITR region. In some embodiments, the viral genome comprises one or more of the sequences provided in any one of Tables 10A, 10B, 11-18, or 26, or a variant thereof, e.g., a sequence at least 70%, 75%, 80%, 85%, 90%, 95%, or 99% identical to any one of the sequences provided in Tables 10A, 10B, 11-18, or 26; a nucleotide sequence comprising one, two, three, but no more than four different nucleotides relative to any one of the sequences provided in Tables 10A, 10B, 11-18, or 26; or a nucleotide sequence comprising one, two, three, but no more than four modifications relative to any one of the sequences provided in Tables 10A, 10B, 11-18, or 26.

TABLE 11
Sequence Regions in the ITR to ITR Sequence

| | VOYTAU1 (SEQ | | VOYTAU2 (SEQ | | VOYTAU3 (SEQ | | VOYTAU4 (SEQ | |
|---|---|---|---|---|---|---|---|---|
| | ID NO: 4439) | | ID NO: 4440) | | ID NO: 4441) | | ID NO: 4442) | |
| | Region | | Region | | Region | | Region | |
| Sequence | SEQ | Region | SEQ | Region | SEQ | Region | SEQ | Region |
| Regions | ID NO | length | ID NO | length | ID NO | length | ID NO | length |
| 5′ ITR | 4469 | 141 | 4469 | 141 | 4469 | 141 | 4469 | 141 |
| CMVie Enhancer | 4472 | 382 | 4472 | 382 | 4472 | 382 | 4472 | 382 |
| CBA Promoter | 5199 | 267 | 5199 | 267 | 5199 | 267 | 5199 | 267 |
| hBG Intron | 4475 | 566 | 4475 | 566 | 4475 | 566 | 4475 | 566 |
| Modulatory | 4380 | 158 | 4381 | 158 | 4382 | 158 | 4383 | 158 |
| Polynucleotide | | | | | | | | |
| hGH PolyA | 4476 | 477 | 4476 | 477 | 4476 | 477 | 4476 | 477 |
| 3′ ITR | 4470 | 141 | 4470 | 141 | 4470 | 141 | 4470 | 141 |

TABLE 12
Sequence Regions in the ITR to ITR Sequence

| | VOYTAU5 (SEQ | | VOYTAU6 (SEQ | | VOYTAU7 (SEQ | | VOYTAU8 (SEQ | |
|---|---|---|---|---|---|---|---|---|
| | ID NO: 4443) | | ID NO: 4444) | | ID NO: 4445) | | ID NO: 4446) | |
| | Region | | Region | | Region | | Region | |
| Sequence | SEQ | Region | SEQ | Region | SEQ | Region | SEQ | Region |
| Regions | ID NO | length | ID NO | length | ID NO | length | ID NO | length |
| 5′ ITR | 4469 | 141 | 4469 | 141 | 4469 | 141 | 4469 | 141 |
| CMVie Enhancer | 4472 | 382 | 4472 | 382 | 4472 | 382 | 4472 | 382 |
| CBA Promoter | 5199 | 267 | 5199 | 267 | 5199 | 267 | 5199 | 267 |
| hBG Intron | 4475 | 566 | 4475 | 566 | 4475 | 566 | 4475 | 566 |
| Modulatory | 4384 | 158 | 4385 | 158 | 4386 | 158 | 4387 | 158 |
| Polynucleotide | | | | | | | | |
| hGH PolyA | 4476 | 477 | 4476 | 477 | 4476 | 477 | 4476 | 477 |
| 3′ ITR | 4470 | 141 | 4470 | 141 | 4470 | 141 | 4470 | 141 |

TABLE 13
Sequence Regions in the ITR to ITR Sequence

| | VOYTAU9 (SEQ | | VOYTAU10 (SEQ | | VOYTAU11 (SEQ | | VOYTAU12 (SEQ | |
|---|---|---|---|---|---|---|---|---|
| | ID NO: 4447) | | ID NO: 4448) | | ID NO: 4449) | | ID NO: 4450) | |
| | Region | | Region | | Region | | Region | |
| Sequence | SEQ | Region | SEQ | Region | SEQ | Region | SEQ | Region |
| Regions | ID NO | length | ID NO | length | ID NO | length | ID NO | length |
| 5′ ITR | 4469 | 141 | 4469 | 141 | 4469 | 141 | 4469 | 141 |
| CMVie Enhancer | 4472 | 382 | 4472 | 382 | 4472 | 382 | 4472 | 382 |
| CBA Promoter | 5199 | 267 | 5199 | 267 | 5199 | 267 | 5199 | 267 |
| hBG Intron | 4475 | 566 | 4475 | 566 | 4475 | 566 | 4475 | 566 |
| Modulatory | 4388 | 158 | 4389 | 158 | 4390 | 158 | 4391 | 158 |
| Polynucleotide | | | | | | | | |
| hGH PolyA | 4476 | 477 | 4476 | 477 | 4476 | 477 | 4476 | 477 |
| 3′ ITR | 4470 | 141 | 4470 | 141 | 4470 | 141 | 4470 | 141 |

TABLE 14
Sequence Regions in the ITR to ITR Sequence

| | VOYTAU13 (SEQ | | VOYTAU14 (SEQ | | VOYTAU15 (SEQ | | VOYTAU16 (SEQ | |
|---|---|---|---|---|---|---|---|---|
| | ID NO: 4451) | | ID NO: 4452) | | ID NO: 4453) | | ID NO: 4454) | |
| | Region | | Region | | Region | | Region | |
| Sequence | SEQ | Region | SEQ | Region | SEQ | Region | SEQ | Region |
| Regions | ID NO | length | ID NO | length | ID NO | length | ID NO | length |
| 5′ ITR | 4469 | 141 | 4469 | 141 | 4469 | 141 | 4469 | 141 |
| CMVie Enhancer | 4472 | 382 | 4472 | 382 | 4472 | 382 | 4472 | 382 |
| CBA Promoter | 5199 | 267 | 5199 | 267 | 5199 | 267 | 5199 | 267 |
| hBG Intron | 4475 | 566 | 4475 | 566 | 4475 | 566 | 4475 | 566 |
| Modulatory | 4392 | 158 | 4393 | 158 | 4394 | 158 | 4395 | 158 |
| Polynucleotide | | | | | | | | |
| hGH PolyA | 4476 | 477 | 4476 | 477 | 4476 | 477 | 4476 | 477 |
| 3′ ITR | 4470 | 141 | 4470 | 141 | 4470 | 141 | 4470 | 141 |

TABLE 15
Sequence Regions in the ITR to ITR Sequence

| | VOYTAU17 (SEQ | | VOYTAU18 (SEQ | | VOYTAU19 (SEQ | | VOYTAU20 (SEQ | |
|---|---|---|---|---|---|---|---|---|
| | ID NO: 4455) | | ID NO: 4456) | | ID NO: 4457) | | ID NO: 4458) | |
| | Region | | Region | | Region | | Region | |
| Sequence | SEQ | Region | SEQ | Region | SEQ | Region | SEQ | Region |
| Regions | ID NO | length | ID NO | length | ID NO | length | ID NO | length |
| 5′ ITR | 4469 | 141 | 4469 | 141 | 4469 | 141 | 4469 | 141 |
| CMVie Enhancer | 4472 | 382 | 4472 | 382 | 4472 | 382 | 4472 | 382 |
| CBA Promoter | 5199 | 267 | 5199 | 267 | 5199 | 267 | 5199 | 267 |
| hBG Intron | 4475 | 566 | 4475 | 566 | 4475 | 566 | 4475 | 566 |
| Modulatory | 4396 | 158 | 4397 | 158 | 4398 | 158 | 4399 | 158 |
| Polynucleotide | | | | | | | | |
| hGH PolyA | 4476 | 477 | 4476 | 477 | 4476 | 477 | 4476 | 477 |
| 3′ ITR | 4470 | 141 | 4470 | 141 | 4470 | 141 | 4470 | 141 |

TABLE 16
Sequence Regions in the ITR to ITR Sequence

| | VOYTAU21 (SEQ | | VOYTAU22 (SEQ | | VOYTAU23 (SEQ | | VOYTAU24 (SEQ | |
|---|---|---|---|---|---|---|---|---|
| | ID NO: 4459) | | ID NO: 4460) | | ID NO: 4461) | | ID NO: 4462) | |
| | Region | | Region | | Region | | Region | |
| Sequence | SEQ | Region | SEQ | Region | SEQ | Region | SEQ | Region |
| Regions | ID NO | length | ID NO | length | ID NO | length | ID NO | length |
| 5′ ITR | 4469 | 141 | 4469 | 141 | 4469 | 141 | 4469 | 141 |
| CMVie Enhancer | 4472 | 382 | 4472 | 382 | 4472 | 382 | 4472 | 382 |
| CBA Promoter | 5199 | 267 | 5199 | 267 | 5199 | 267 | 5199 | 267 |
| hBG Intron | 4475 | 566 | 4475 | 566 | 4475 | 566 | 4475 | 566 |
| Modulatory | 4400 | 158 | 4401 | 158 | 4402 | 158 | 4403 | 158 |
| Polynucleotide | | | | | | | | |
| hGH PolyA | 4476 | 477 | 4476 | 477 | 4476 | 477 | 4476 | 477 |
| 3′ ITR | 4470 | 141 | 4470 | 141 | 4470 | 141 | 4470 | 141 |

TABLE 17
Sequence Regions in the ITR to ITR Sequence

| | VOYTAU25 (SEQ | | VOYTAU26 (SEQ | | VOYTAU27 (SEQ | | VOYTAU28 (SEQ | |
|---|---|---|---|---|---|---|---|---|
| | ID NO: 4463) | | ID NO: 4464) | | ID NO: 4465) | | ID NO: 4466) | |
| | Region | | Region | | Region | | Region | |
| Sequence | SEQ | Region | SEQ | Region | SEQ | Region | SEQ | Region |
| Regions | ID NO | length | ID NO | length | ID NO | length | ID NO | length |
| 5′ ITR | 4469 | 141 | 4469 | 141 | 4469 | 141 | 4469 | 141 |
| CMVie | 4472 | 382 | 4472 | 382 | 4472 | 382 | 4472 | 382 |
| Enhancer | | | | | | | | |
| CBA Promoter | 5199 | 267 | 5199 | 267 | 5199 | 267 | 5199 | 267 |
| hBG Intron | 4475 | 566 | 4475 | 566 | 4475 | 566 | 4475 | 566 |
| Modulatory | 4404 | 158 | 4405 | 260 | 4406 | 260 | 4407 | 260 |
| Polynucleotide | | | | | | | | |
| hGH PolyA | 4476 | 477 | 4476 | 477 | 4476 | 477 | 4476 | 477 |
| 3′ ITR | 4470 | 141 | 4470 | 141 | 4470 | 141 | 4470 | 141 |

TABLE 18
Sequence Regions in the ITR to ITR Sequence

| | VOYTAU29 (SEQ | | VOYTAU30 (SEQ | | |
|---|---|---|---|---|---|
| | ID NO: 4467) | | ID NO: 4468) | | VOYTAU77 (SEQ |
| | Region | | Region | | ID NO: 5195) |
| | SEQ | Region | SEQ | Region | Region |
| Sequence Regions | ID NO | length | ID NO | length | SEQ ID NO |
| 5′ ITR | 4469 | 141 | 4469 | 141 | 5197 |
| CMVie Enhancer | 4472 | 382 | 4472 | 382 | 4471 |
| CBA Promoter | 5199 | 267 | 5199 | 267 | 5199 |
| hBG Intron | 4475 | 566 | 4475 | 566 | 4475 |
| Modulatory | 4408 | 260 | 4409 | 260 | 4408 |
| Polynucleotide | | | | | |
| hGH Poly A | 4476 | 477 | 4476 | 477 | 4476 |
| 3′ ITR | 4470 | 141 | 4470 | 141 | 5200 |

TABLE 26
Sequence Regions in the ITR to ITR Sequences

| | VOYTAU55 | VOYTAU78 | VOYTAU64 | VOYTAU65 | VOYTAU66 | VOYTAU67 |
|---|---|---|---|---|---|---|
| | (SEQ ID NO: | (SEQ ID NO: | (SEQ ID NO: | (SEQ ID NO: | (SEQ ID NO: | (SEQ ID NO: |
| | 5173) | 5196) | 5182) | 5183) | 5184) | 5185) |
| Sequence | Region SEQ | Region SEQ | Region SEQ | Region SEQ | Region SEQ | Region SEQ |
| Regions | ID NO: | ID NO: | ID NO: | ID NO: | ID NO: | ID NO: |
| 5′ ITR | 5197 | 5197 | 5197 | 5197 | 5197 | 5197 |
| CMVie | 4471 | 4471 | 4471 | 4471 | 4471 | 4471 |
| Enhancer | | | | | | |
| CBA | 5199 | 5199 | 5199 | 5199 | 5199 | 5199 |
| Promoter | | | | | | |
| hBG Intron | 4475 | 4475 | 4475 | 4475 | 4475 | 4475 |
| Modulatory | 4405 | 4409 | 4390 | 4391 | 4393 | 4394 |
| Polynucleotide | | | | | | |
| hGH PolyA | 4476 | 4476 | 4476 | 4476 | 4476 | 4476 |
| 3′ ITR | 5200 | 5200 | 5200 | 5200 | 5200 | 5200 |

[0757] In some embodiments, the present disclosure provides AAV particles comprising a viral genome described herein, and an AAV capsid protein, e.g., an AAV capsid variant described herein. In some embodiments, the present disclosure provides a vector comprising a viral genome described herein.

[0758] In other embodiments, an AAV particle comprising a nucleic acid sequence encoding a siRNA molecule is to deliver siRNA molecules to the central nervous system, e.g., as described in U.S. Pat. No. 6,180,613; the contents of which is herein incorporated by reference in its entirety.

### Viral Production

[0759] Cells for the production of AAV, e.g., rAAV, particles may comprise, in some embodiments, mammalian cells (such as HEK293 cells) and/or insect cells (such as Sf9 cells).

[0760] In some embodiments, AAV production includes processes and methods for producing AAV particles and vectors which can contact a target cell to deliver a payload, e.g. a recombinant viral construct, which includes a nucleotide encoding a payload molecule. In certain embodiments, the viral vectors are adeno-associated viral (AAV) vectors such as recombinant adeno-associated viral (rAAV) vectors. In certain embodiments, the AAV particles are adeno-associated viral (AAV) particles such as recombinant adeno-associated viral (rAAV) particles.

[0761] In some embodiments, disclosed herein is a vector comprising a viral genome described herein. In some embodiments, disclosed herein is a vector comprising a nucleotide sequence encoding a modulatory polynucleotide, e.g., a modulatory polynucleotide described herein. In some embodiments, the present disclosure provides a vector comprising a nucleotide sequence encoding an siRNA, e.g., an siRNA for targeting a MAPT gene, mRNA, and/or protein as described herein.

[0762] In some embodiments, disclosed herein is a cell comprising a viral genome, modulatory polynucleotide, siRNA, and/or AAV particle of the present disclosure. In some embodiments, the cell is a bacterial cell (e.g. an E. coli cell), a mammalian cell (e.g., a HEK293 cell or a CNS cell), or an insect cell (e.g., an Sf9 cell or an Sf21 cell).

[0763] In some embodiments, disclosed herein is a method of making a recombinant AAV particle of the present disclosure, the method comprising (i) providing a host cell comprising a viral genome described herein and incubating the host cell under conditions suitable to enclose the viral genome in an AAV capsid polypeptide, e.g., an AAV capsid variant, as described herein (e.g., an AAV capsid variant as provided in Table 1 or functional variant thereof), thereby making the recombinant AAV particle. In some embodiments, the method comprises prior to step (i), introducing a first nucleic acid comprising the viral genome into a cell. In some embodiments, the host cell comprises a second nucleic acid encoding the capsid protein. In some embodiments, the second nucleic acid is introduced into the host cell prior to, concurrently with, or after the first nucleic acid molecule. In some embodiments, the host cell is a bacterial cell, a mammalian cell (e.g., a HEK293 cell), or an insect cell (e.g., an Sf9 cell).

[0764] In some embodiments, disclosed herein is a method of making a viral genome. The method comprising providing a nucleic acid encoding a viral genome described herein and a backbone region suitable for replication of the viral genome in a cell, e.g., a bacterial cell (e.g., wherein the backbone region comprises one or both of a bacterial origin of replication and a selectable marker), and excising the viral genome from the backbone region, e.g., by cleaving the nucleic acid molecule at upstream and downstream of the viral genome. In some embodiments, the viral genome comprising a promoter operably linked to nucleic acid comprising a transgene encoding a polynucleotide (e.g., a MAPT targeting siRNA described herein), will be incorporated into an AAV particle produced in the cell. In some embodiments, the cell is a bacterial cell, a mammalian cell (e.g., a HEK293 cell), or an insect cell (e.g., an Sf9 cell).

[0765] In some embodiments, a vector used for AAV production comprises a nucleotide sequence encoding an AAV capsid protein, e.g., one, two, or all of a VP1 capsid protein, a VP2 capsid protein, or a VP3 capsid protein. In some embodiments, the nucleotide sequence encoding the capsid protein, e.g., the VP1 capsid protein, comprises a canonical start codon (e.g., an ATG). In some embodiments, the nucleotide sequence encoding the AAV capsid protein, e.g., an AAV VP1 capsid protein, is a non-ATG start codon, e.g., a non-canonical start codon (e.g., ACG, TTG, or GTG), e.g., a start codon capable of altering the ratio of the viral capsid proteins in the production system.

[0766] In some embodiments, the vector(s) used for AAV production comprises a nucleotide sequence encoding an AAV rep protein, e.g., a Rep78 protein, a Rep52 protein, a Rep40 protein, and/or a Rep68 protein (e.g., a Rep78 and Rep52 protein). In some embodiments, the nucleotide sequence encoding the Rep protein comprises an ATG start codon. In some embodiments, the nucleotide sequence comprises a non-ATG start codon, e.g., a non-canonical stop codon, e.g., ACG, TTG, CTG or GTG.

[0767] In some embodiments, an AAV particle described herein is generated using a method described in WO 2022/187473, WO 2022/187548, WO 2021/041485, WO 2020/150556, WO 2020/081490, WO 2020/072844, WO 2020/023612, WO 2021/030125, WO 2020/223274, WO 2019/241486, WO2022032153, the contents of each of which are hereby incorporated by reference it their entirety.

### Cells

[0768] In some embodiments, the present disclosure provides a cell comprising an AAV particle, a viral genome, a modulatory polynucleotide, and/or an siRNA targeting a MAPT gene, mRNA, and/or protein described herein.

[0769] Viral production disclosed herein describes processes and methods for producing an AAV particle, which comprise contacting a target cell to deliver a payload, e.g. a siRNA for targeting MAPT or an modulatory polynucleotide comprising a siRNA for targeting MAPT.

[0770] In some embodiments, the AAV particle of the present disclosure may be produced in insect cells (e.g., Sf9 cells). In some embodiments, the AAV particle of the present disclosure may be produced using triple transfection. In some embodiments, the AAV particle of the present disclosure may be produced in mammalian cells. In some embodiments, the AAV particle of the present disclosure may be produced by triple transfection in mammalian cells. In some embodiments, the AAV particle of the present disclosure may be produced by triple transfection in HEK293 cells.

[0771] In some embodiments, the AAV particles may be produced in a viral replication cell that comprises an insect cell. Growing conditions for insect cells in culture, and production of heterologous products in insect cells in culture are well-known in the art, see U.S. Pat. No. 6,204,059, the contents of which are herein incorporated by reference in their entirety.

[0772] Any insect cell which allows for replication of parvovirus and which can be maintained in culture can be used in accordance with the present disclosure. Cell lines may be used from Spodoptera frugiperda, including, but not limited to the Sf9 or Sf21 cell lines, Drosophila cell lines, or mosquito cell lines, such as Aedes albopictus derived cell lines. Use of insect cells for expression of heterologous proteins is well documented, as are methods of introducing nucleic acids, such as vectors, e.g., insect-cell compatible vectors, into such cells and methods of maintaining such cells in culture. See, for example, Methods in Molecular Biology, ed. Richard, Humana Press, NJ (1995); O'Reilly et al., Baculovirus Expression Vectors, A Laboratory Manual, Oxford Univ. Press (1994); Samulski et al., J. Vir. 63:3822-8 (1989); Kajigaya et al., Proc. Nat'l. Acad. Sci. USA 88:4646-50 (1991); Ruffing et al., J. Vir. 66:6922-30 (1992); Kimbauer et al., Vir. 219:37-44 (1996); Zhao et al., Vir. 272:382-93 (2000); and Samulski et al., U.S. Pat. No. 6,204,059, the contents of each of which is herein incorporated by reference in its entirety.

[0773] In certain embodiments, the AAV particles of the present disclosure may be produced in a viral production cell that includes a mammalian cell. Viral production cells may comprise mammalian cells such as A549, WEH1, 3T3, 10T1/2, BHK, MDCK, COS 1, COS 7, BSC 1, BSC 40, BMT 10, VERO, W138, HeLa, HEK293, HEK293T (293T), Saos, C2C12, L cells, HT1080, Huh7, HepG2, C127, 3T3, CHO, HeLa cells, KB cells, BHK and primary fibroblast, hepatocyte, and myoblast cells derived from mammals. Viral production cells can include cells derived from any mammalian species including, but not limited to, human, monkey, mouse, rat, rabbit, and hamster or cell type, including but not limited to fibroblast, hepatocyte, tumor cell, cell line transformed cell, etc.

### Small Scale Production of AAV Particles

[0774] In some embodiments, viral production comprises processes and methods for producing an AAV particle, e.g., an AAV particle for contacting a target cell to deliver a payload, e.g. a siRNA for targeting MAPT or an modulatory polynucleotide comprising a siRNA for targeting MAPT.

[0775] In some embodiments, the AAV particles may be produced in a viral replication cell that comprises a mammalian cell. In some embodiments, the viral replication cell is a HEK293 cell, a COS cell, a HeLa cell, a KB cell, or a mammalian cell line as described in U.S. Pat. Nos. 6,156,303, 5,387,484, 5,741,683, 5,691,176, and 5,688,676; U.S. patent application 2002/0081721, and International Patent Applications WO00/47757, WO 00/24916, and WO 96/17947, the contents of each of which are herein incorporated by reference in their entireties.

[0776] In some embodiments, an AAV particle is produced in a mammalian cell wherein all three VP proteins are expressed at a stoichiometry of about 1:1:10 (VP1:VP2:VP3). In some embodiments, the regulatory mechanisms that allow this controlled level of expression include the production of two mRNAs, one for VP1, and the other for VP2 and VP3, produced by differential splicing.

[0777] In some embodiments, an AAV particle is produced in a mammalian cells using a triple transfection method. In some embodiments, the method comprises providing a payload construct, parvoviral Rep and parvoviral Cap and a helper construct are comprised.

### Baculovirus Production

[0778] In certain embodiments, processes of the present disclosure can include production of AAV particles or viral vectors in a baculoviral system, e.g., an AAV viral production system. In certain embodiments, the AAV production system comprises an AAV expression construct. In some embodiments, the AAV expression construct comprises a baculovirus genome, e.g., a variant baculovirus genome, e.g., a variant baculovirus genome comprising a modification in at least one (e.g., at least two, three, four or more) non-essential genes. In some, embodiments, the AAV expression construct comprises at least one or two Rep-coding region and one, two, or three VP-coding regions. In some embodiments, the AAV production system further comprises an AAV payload construct. In some embodiments, the AAV payload construct encodes a payload described herein e.g., a modulatory polynucleotide comprising a siRNA for targeting MAPT or an siRNA for targeting MAPT. In some embodiments, the AAV expression construct, AAV payload construct, and/or AAV production system is as described and provided in WO 2022/187473, WO 2022/187548, WO 2021/041485, WO 2020/150556, WO 2020/081490, WO 2020/072844, WO 2020/023612, WO 2021/030125, WO 2020/223274, WO 2019/241486, WO2022032153, the contents of each of which are hereby incorporated by reference it their entirety.

[0779] In certain embodiments, BEVs are produced using a Bacmid Transfection agent, such as Promega FuGENE® HD, WFI water, or ThermoFisher Cellfectin® II Reagent. In certain embodiments, BEVs are produced and expanded in viral production cells, such as an insect cell.

[0780] In certain embodiments, the method utilizes seed cultures of viral production cells that include one or more BEVs, including baculovirus infected insect cells (BIICs). The seed BIICs have been transfected/transduced/infected with an Expression BEV which includes a viral expression construct, and also a Payload BEV which includes a payload construct. In certain embodiments, the seed cultures are harvested, divided into aliquots and frozen, and may be used at a later time to initiate transfection/transduction/infection of a naïve population of production cells. In certain embodiments, a bank of seed BIICs is stored at −80° C. or in LN2 vapor.

[0781] In some embodiments, the AAV expression constructs are capable of producing AAV particles in insect cells, including but not limited to Spodoptera frugiperda (Sf9) cells, provide high titers of viral vector product. Recombinant baculovirus encoding the viral expression construct and payload construct initiates a productive infection of viral vector replicating cells. Infectious baculovirus particles released from the primary infection secondarily infect additional cells in the culture, exponentially infecting the entire cell culture population in a number of infection cycles that is a function of the initial multiplicity of infection, see Urabe, M. et al. J Virol. 2006 February; 80(4):1874-85, the contents of which are herein incorporated by reference in their entirety as related to the production and use of BEVs and viral particles.

[0782] In certain embodiments, stable viral producing cells permissive for baculovirus infection are engineered with at least one stable integrated copy of any of the elements necessary for AAV replication and vector production including, but not limited to, the entire AAV genome, Rep and Cap genes, Rep genes, Cap genes, each Rep protein as a separate transcription cassette, each VP protein as a separate transcription cassette, the AAP (assembly activation protein), or at least one of the baculovirus helper genes with native or non-native promoters.

### Large-Scale Production

[0783] In some embodiments, AAV particle production may be modified to increase the scale of production. Large scale viral production methods according to the present disclosure may include any of those taught in U.S. Pat. Nos. 5,756,283, 6,258,595, 6,261,551, 6,270,996, 6,281,010, 6,365,394, 6,475,769, 6,482,634, 6,485,966, 6,943,019, 6,953,690, 7,022,519, 7,238,526, 7,291,498 and 7,491,508 or International Publication Nos. WO1996039530, WO1998010088, WO1999014354, WO1999015685, WO1999047691, WO2000055342, WO2000075353 and WO2001023597, the contents of each of which are herein incorporated by reference in their entirety. Methods of increasing viral particle production scale typically comprise increasing the number of viral replication cells. In some embodiments, viral replication cells comprise adherent cells. To increase the scale of viral particle production by adherent viral replication cells, larger cell culture surfaces are required. In some cases, large-scale production methods comprise the use of roller bottles to increase cell culture surfaces. Other cell culture substrates with increased surface areas are known in the art. Examples of additional adherent cell culture products with increased surface areas include, but are not limited to CellSTACK®, CellCube® (Corning Corp., Corning, NY) and Nunc™ Cell Factory™ (Thermo Scientific, Waltham, MA.) In some cases, large-scale adherent cell surfaces may comprise from about 1,000 cm² to about 100,000 cm². In some cases, large-scale adherent cell cultures may comprise from about 107 to about 109 cells, from about 108 to about 1010 cells, from about 109 to about 1012 cells or at least 1012 cells. In some cases, large-scale adherent cultures may produce from about 109 to about 1012, from about 1010 to about 1013, from about 1011 to about 1014, from about 1012 to about 1015 or at least 1015 viral particles.

[0784] In some embodiments, large-scale viral production methods of the present disclosure may comprise the use of suspension cell cultures. Suspension cell culture allows for significantly increased numbers of cells. Typically, the number of adherent cells that can be grown on about 10-50 cm² of surface area can be grown in about 1 cm3 volume in suspension.

[0785] Transfection of replication cells in large-scale culture formats may be carried out according to any methods known in the art. For large-scale adherent cell cultures, transfection methods may include, but are not limited to the use of inorganic compounds (e.g. calcium phosphate), organic compounds [e.g. polyethyleneimine (PEI)] or the use of non-chemical methods (e.g. electroporation.) With cells grown in suspension, transfection methods may include, but are not limited to the use of calcium phosphate and the use of PEI. In some cases, transfection of large-scale suspension cultures may be carried out according to the section entitled “Transfection Procedure” described in Feng, L. et al., 2008. Biotechnol Appl. Biochem. 50:121-32, the contents of which are herein incorporated by reference in their entirety. According to such embodiments, PEI-DNA complexes may be formed for introduction of plasmids to be transfected. In some cases, cells being transfected with PEI-DNA complexes may be ‘shocked’ prior to transfection. This comprises lowering cell culture temperatures to 4° C. for a period of about 1 hour. In some cases, cell cultures may be shocked for a period of from about 10 minutes to about 5 hours. In some cases, cell cultures may be shocked at a temperature of from about 0° C. to about 20° C.

[0786] In some cases, transfections may include one or more vectors for expression of an RNA effector molecule to reduce expression of nucleic acids from one or more AAV payload constructs. Such methods may enhance the production of viral particles by reducing cellular resources wasted on expressing payload constructs. In some cases, such methods may be carried according to those taught in US Publication No. US2014/0099666, the contents of which are herein incorporated by reference in their entirety.

[0787] AAV particles of the present disclosure may be prepared by any method known in the art, such as, but not limited to, mammalian cell production methods or insect cell production methods.

### II. FORMULATION AND DELIVERY

### Pharmaceutical Compositions and Formulation

[0788] The AAV particles of the present disclosure may be used to prepare a pharmaceutical composition.

[0789] It will be understood by the skilled artisan that the pharmaceutical compositions of the present disclosure are suitable for administration to humans, but that such compositions are also generally suitable for administration to any other animal, e.g., to non-human animals, e.g. non-human mammals. Modification of pharmaceutical compositions suitable for administration to humans in order to render the compositions suitable for administration to various animals is well understood, and the ordinarily skilled veterinary pharmacologist can design and/or perform such modification with merely ordinary, if any, experimentation. Subjects to which administration of the pharmaceutical compositions is contemplated include, but are not limited to, humans and/or other primates.

[0790] In some embodiments, compositions are administered to humans, human patients or subjects. For the purposes of the present disclosure, the phrase “active ingredient” generally refers either to the synthetic siRNA duplexes, the vector, e.g., AAV vector, encoding the siRNA duplexes, or to the siRNA molecule delivered by a vector as described herein.

[0791] Formulations of the pharmaceutical compositions described herein may be prepared by any method known or hereafter developed in the art of pharmacology. In general, such preparatory methods include the step of bringing the active ingredient into association with an excipient and/or one or more other accessory ingredients, and then, if necessary and/or desirable, dividing, shaping and/or packaging the product into a desired single- or multi-dose unit.

[0792] Relative amounts of the active ingredient, the pharmaceutically acceptable excipient, and/or any additional ingredients in a pharmaceutical composition in accordance with the disclosure will vary, depending upon the identity, size, and/or condition of the subject treated and further depending upon the route by which the composition is to be administered.

[0793] The vector genomes comprising the nucleic acid sequence encoding the siRNA molecules of the present disclosure can be formulated using one or more excipients to: (1) increase stability; (2) increase cell transfection or transduction; (3) permit the sustained or delayed release; or (4) alter the biodistribution (e.g., target the AAV particles and/or vector genome to specific tissues or cell types such as brain and neurons).

[0794] Formulations of the present disclosure can include, without limitation, saline, lipidoids, liposomes, lipid nanoparticles, polymers, lipoplexes, core-shell nanoparticles, peptides, proteins, cells transfected with viral vectors such as, but not limited to, AAV particles (e.g., for transplantation into a subject), nanoparticle mimics and combinations thereof. Further, the viral vectors of the present disclosure (e.g., AAV particles) may be formulated using self-assembled nucleic acid nanoparticles.

[0795] A pharmaceutical composition in accordance with the present disclosure may be prepared, packaged, and/or sold in bulk, as a single unit dose, and/or as a plurality of single unit doses. As used herein, a “unit dose” refers to a discrete amount of the pharmaceutical composition comprising a predetermined amount of the active ingredient. The amount of the active ingredient is generally equal to the dosage of the active ingredient which would be administered to a subject and/or a convenient fraction of such a dosage such as, for example, one-half or one-third of such a dosage.

[0796] Relative amounts of the active ingredient, the pharmaceutically acceptable excipient, and/or any additional ingredients in a pharmaceutical composition in accordance with the present disclosure may vary, depending upon the identity, size, and/or condition of the subject being treated and further depending upon the route by which the composition is to be administered. For example, the composition may comprise between 0.1% and 99% (w/w) of the active ingredient. By way of example, the composition may comprise between 0.1% and 100%, e.g., between 0.5 and 50%, between 1-30%, between 5-80%, at least 80% (w/w) active ingredient.

[0797] In some embodiments, a pharmaceutically acceptable excipient may be at least 95%, at least 96%, at least 97%, at least 98%, at least 99%, or 100% pure. In some embodiments, an excipient is approved for use for humans and for veterinary use. In some embodiments, an excipient may be approved by the United States Food and Drug Administration. In some embodiments, an excipient may be of pharmaceutical grade. In some embodiments, an excipient may meet the standards of the United States Pharmacopoeia (USP), the European Pharmacopoeia (EP), the British Pharmacopoeia, and/or the International Pharmacopoeia.

[0798] Excipients, which, as used herein, include, but are not limited to, any and all solvents, dispersion media, diluents, or other liquid vehicles, dispersion or suspension aids, surface active agents, isotonic agents, thickening or emulsifying agents, preservatives, and the like, as suited to the particular dosage form desired. Various excipients for formulating pharmaceutical compositions and techniques for preparing the composition are known in the art (see Remington: The Science and Practice of Pharmacy, 21st Edition, A. R. Gennaro, Lippincott, Williams & Wilkins, Baltimore, MD, 2006; incorporated herein by reference in its entirety). The use of a conventional excipient medium may be contemplated within the scope of the present disclosure, except insofar as any conventional excipient medium may be incompatible with a substance or its derivatives, such as by producing any undesirable biological effect or otherwise interacting in a deleterious manner with any other component(s) of the pharmaceutical composition.

[0799] Exemplary diluents include, but are not limited to, calcium carbonate, sodium carbonate, calcium phosphate, dicalcium phosphate, calcium sulfate, calcium hydrogen phosphate, sodium phosphate lactose, sucrose, cellulose, microcrystalline cellulose, kaolin, mannitol, sorbitol, inositol, sodium chloride, dry starch, cornstarch, powdered sugar, etc., and/or combinations thereof.

[0800] In some embodiments, the formulations may comprise at least one inactive ingredient. As used herein, the term “inactive ingredient” refers to one or more inactive agents included in formulations. In some embodiments, all, none or some of the inactive ingredients which may be used in the formulations of the present disclosure may be approved by the US Food and Drug Administration (FDA).

[0801] Formulations of vectors comprising the nucleic acid sequence for the siRNA molecules of the present disclosure may include cations or anions. In some embodiments, the formulations include metal cations such as, but not limited to, Zn2+, Ca2+, Cu2+, Mg+ and combinations thereof.

[0802] As used herein, “pharmaceutically acceptable salts” refers to derivatives of the disclosed compounds wherein the parent compound is modified by converting an existing acid or base moiety to its salt form (e.g., by reacting the free base group with a suitable organic acid). Examples of pharmaceutically acceptable salts include, but are not limited to, mineral or organic acid salts of basic residues such as amines; alkali or organic salts of acidic residues such as carboxylic acids; and the like. Representative acid addition salts include acetate, acetic acid, adipate, alginate, ascorbate, aspartate, benzenesulfonate, benzene sulfonic acid, benzoate, bisulfate, borate, butyrate, camphorate, camphorsulfonate, citrate, cyclopentanepropionate, digluconate, dodecylsulfate, ethanesulfonate, fumarate, glucoheptonate, glycerophosphate, hemisulfate, heptonate, hexanoate, hydrobromide, hydrochloride, hydroiodide, 2-hydroxy-ethanesulfonate, lactobionate, lactate, laurate, lauryl sulfate, malate, maleate, malonate, methanesulfonate, 2-naphthalenesulfonate, nicotinate, nitrate, oleate, oxalate, palmitate, pamoate, pectinate, persulfate, 3-phenylpropionate, phosphate, picrate, pivalate, propionate, stearate, succinate, sulfate, tartrate, thiocyanate, toluenesulfonate, undecanoate, valerate salts, and the like. Representative alkali or alkaline earth metal salts include sodium, lithium, potassium, calcium, magnesium, and the like, as well as nontoxic ammonium, quaternary ammonium, and amine cations, including, but not limited to ammonium, tetramethylammonium, tetraethylammonium, methylamine, dimethylamine, trimethylamine, triethylamine, ethylamine, and the like. The pharmaceutically acceptable salts of the present disclosure include the conventional non-toxic salts of the parent compound formed, for example, from non-toxic inorganic or organic acids. The pharmaceutically acceptable salts of the present disclosure can be synthesized from the parent compound which contains a basic or acidic moiety by conventional chemical methods. Generally, such salts can be prepared by reacting the free acid or base forms of these compounds with a stoichiometric amount of the appropriate base or acid in water or in an organic solvent, or in a mixture of the two; generally, nonaqueous media like ether, ethyl acetate, ethanol, isopropanol, or acetonitrile are preferred. Lists of suitable salts are found in Remington's Pharmaceutical Sciences, 17th ed., Mack Publishing Company, Easton, Pa., 1985, p. 1418, Pharmaceutical Salts: Properties, Selection, and Use, P. H. Stahl and C. G. Wermuth (eds.), Wiley-VCH, 2008, and Berge et al., Journal of Pharmaceutical Science, 66, 1-19 (1977); the content of each of which is incorporated herein by reference in its entirety.

[0803] The term “pharmaceutically acceptable solvate,” as used herein, means a compound of the disclosure wherein molecules of a suitable solvent are incorporated in the crystal lattice. A suitable solvent is physiologically tolerable at the dosage administered. For example, solvates may be prepared by crystallization, recrystallization, or precipitation from a solution that includes organic solvents, water, or a mixture thereof. Examples of suitable solvents are ethanol, water (for example, mono-, di-, and tri-hydrates), N-methylpyrrolidinone (NMP), dimethyl sulfoxide (DMSO), N,N′-dimethylformamide (DMF), N,N′-dimethylacetamide (DMAC), 1,3-dimethyl-2-imidazolidinone (DMEU), 1,3-dimethyl-3,4,5,6-tetrahydro-2-(1H)-pyrimidinone (DMPU), acetonitrile (ACN), propylene glycol, ethyl acetate, benzyl alcohol, 2-pyrrolidone, benzyl benzoate, and the like. When water is the solvent, the solvate is referred to as a “hydrate.”

[0804] According to the present disclosure, the vector, e.g., AAV vector, comprising the nucleic acid sequence for the siRNA molecules of the present disclosure may be formulated for CNS delivery. Agents that cross the brain blood barrier (BBB) may be used. For example, some cell-penetrating peptides that can target the BBB endothelium may be used.

### Inactive Ingredients

[0805] In some embodiments, formulations may comprise at least one excipient which is an inactive ingredient. As used herein, the term “inactive ingredient” refers to one or more inactive agents included in formulations. In some embodiments, all, none or some of the inactive ingredients which may be used in the formulations of the present disclosure may be approved by the US Food and Drug Administration (FDA).

[0806] Formulations of AAV particles and viral vectors carrying compositions described herein may include cations or anions. In some embodiments, the formulations include metal cations such as, but not limited to, Zn2+, Ca2+, Cu2+, Mg+ and combinations thereof. As a non-limiting example, formulations may include polymers and compositions described herein complexed with a metal cation (See e.g., U.S. Pat. Nos. 6,265,389 and 6,555,525, each of which is herein incorporated by reference in its entirety).

### Delivery

[0807] In some embodiments, the AAV particles and viral vector comprising compositions described herein may be administered or delivered using the methods for the delivery of AAV virions described in European Patent Application No. EP1857552, the contents of which are herein incorporated by reference in their entirety.

[0808] In some embodiments, the AAV particles and viral vector comprising compositions described herein may be administered or delivered using the methods for delivering proteins using AAV vectors described in European Patent Application No. EP2678433, the contents of which are herein incorporated by reference in their entirety.

[0809] In some embodiments, the AAV particles and viral vector comprising compositions described herein may be administered or delivered using the methods for delivering DNA molecules using AAV vectors described in U.S. Pat. No. 5,858,351, the contents of which are herein incorporated by reference in their entirety.

[0810] In some embodiments, the AAV particles and viral vector comprising compositions described herein may be administered or delivered using the methods for delivering DNA to the bloodstream described in U.S. Pat. No. 6,211,163, the contents of which are herein incorporated by reference in their entirety.

[0811] In some embodiments, the AAV particles and viral vector comprising compositions described herein may be administered or delivered using the methods for delivering AAV virions described in U.S. Pat. No. 6,325,998, the contents of which are herein incorporated by reference in their entirety.

[0812] In some embodiments, the AAV particles and viral vector comprising compositions described herein may be administered or delivered using the methods for delivering a payload to the central nervous system described in U.S. Pat. No. 7,588,757, the contents of which are herein incorporated by reference in their entirety.

[0813] In some embodiments, the AAV particles and viral vector comprising compositions described herein may be administered or delivered using the methods for delivering a payload described in U.S. Pat. No. 8,283,151, the contents of which are herein incorporated by reference in their entirety.

[0814] In some embodiments, the AAV particles and viral vector comprising compositions described herein may be administered or delivered using the methods for delivering a payload using a glutamic acid decarboxylase (GAD) delivery vector described in International Patent Publication No. WO2001089583, the contents of which are herein incorporated by reference in their entirety.

[0815] In some embodiments, the AAV particles and viral vector comprising compositions described herein may be administered or delivered using the methods for delivering a payload to neural cells described in International Patent Publication No. WO2012057363, the contents of which are herein incorporated by reference in their entirety.

### Delivery to Cells

[0816] The present disclosure provides a method of delivering to a cell or tissue any of the above-described AAV polynucleotides or AAV genomes, comprising contacting the cell or tissue with said AAV polynucleotide or AAV genomes or contacting the cell or tissue with a particle comprising said AAV polynucleotide or AAV genome, or contacting the cell or tissue with any of the described compositions, including pharmaceutical compositions. The method of delivering the AAV polynucleotide or AAV genome to a cell or tissue can be accomplished in vitro, ex vivo, or in vivo.

Introduction into Cells—AAV Vectors

[0817] The siRNA molecules (e.g., siRNA duplexes) of the present disclosure may be introduced into cells using any of a variety of approaches such as, but not limited to, viral vectors (e.g., AAV vectors or AAV particles). These viral vectors are engineered and optimized to facilitate the entry of siRNA molecule into cells that are not readily amendable to transfection. Also, some synthetic viral vectors possess an ability to integrate the shRNA into the cell genome, thereby leading to stable siRNA expression and long-term knockdown of a target gene. In this manner, viral vectors are engineered as vehicles for specific delivery while lacking the deleterious replication and/or integration features found in wild-type virus.

[0818] In some embodiments, the siRNA molecules of the present disclosure are introduced into a cell by contacting the cell with a composition comprising a lipophilic carrier and a vector, e.g., an AAV vector, comprising a nucleic acid sequence encoding the siRNA molecules of the present disclosure. In other embodiments, the siRNA molecule is introduced into a cell by transfecting or infecting the cell with a vector, e.g., an AAV vector, comprising nucleic acid sequences capable of producing the siRNA molecule when transcribed in the cell. In some embodiments, the siRNA molecule is introduced into a cell by injecting into the cell a vector, e.g., an AAV vector, comprising a nucleic acid sequence capable of producing the siRNA molecule when transcribed in the cell.

[0819] In some embodiments, prior to transfection, a vector, e.g., an AAV vector, comprising a nucleic acid sequence encoding the siRNA molecules of the present disclosure may be transfected into cells.

[0820] In other embodiments, the vectors, e.g., AAV vectors, comprising the nucleic acid sequence encoding the siRNA molecules of the present disclosure may be delivered into cells by electroporation (e.g. U.S. Patent Publication No. 20050014264; the content of which is herein incorporated by reference in its entirety).

[0821] Other methods for introducing vectors, e.g., AAV vectors, comprising the nucleic acid sequence for the siRNA molecules described herein may include photochemical internalization as described in U.S. Patent publication No. 20120264807; the content of which is herein incorporated by reference in its entirety.

[0822] In some embodiments, the formulations described herein may contain at least one vector, e.g., AAV vectors, comprising the nucleic acid sequence encoding the siRNA molecules described herein. In some embodiments, the siRNA molecules may target the MAPT transcript at one target site. In another embodiment, the formulation comprises a plurality of vectors, e.g., AAV vectors, each vector comprising a nucleic acid sequence encoding a siRNA molecule targeting the MAPT transcript at a different target site. The MAPT transcript may be targeted at 2, 3, 4, 5 or more than 5 sites.

[0823] In some embodiments, the vectors, e.g., AAV vectors, from any relevant species, such as, but not limited to, human, dog, mouse, rat or monkey may be introduced into cells.

[0824] In some embodiments, the vectors, e.g., AAV vectors, may be introduced into cells which are relevant to the disease to be treated. As a non-limiting example, the disease is Alzheimer's disease (AD), frontotemporal dementia (FTD), and/or Dravet syndrome (DS), and the target cells are neurons, e.g., interneurons, and astrocytes.

[0825] In some embodiments, the vectors, e.g., AAV vectors, may be introduced into cells which have a high level of endogenous expression of the target sequence.

[0826] In another embodiment, the vectors, e.g., AAV vectors, may be introduced into cells which have a low level of endogenous expression of the target sequence.

[0827] In some embodiments, the cells may be those which have a high efficiency of AAV transduction.

### Delivery to Subjects

[0828] The present disclosure additionally provides a method of delivering to a subject, including a mammalian subject, any of the above-described AAV particles which comprises a vector genome encoding the sense, antisense and/or siRNA duplex described herein. As a non-limiting example, the mammalian subject may be a rodent, such as but not limited to, a transgenic mouse (e.g., htau, P301S, rTg4510, rTgTauEC, SCN1a-A1783V) or a non-transgenic (wild type) mouse. As another non-limiting example, the subject may be a non-human primate, such as but not limited to a rhesus macaque (Macaca mulatta). As yet another non-limiting example, the subject may be a human. In some embodiments, the human is a healthy human. In some embodiments, the human is a patient who has been diagnosed with a neurological disorder. In some embodiments, the human is a patient who has been diagnosed with or is suspected of having or is susceptible to a tauopathy. In some embodiments, the human is a patient who has been diagnosed with or is suspected of having or is susceptible to a epilepsy. Administration of any of the here within described AAV particles comprising a vector genome encoding a modulatory polynucleotide may be used to manage, prevent, slow the progression of, treat the symptoms associated with, and/or cure a disease afflicting the mammalian subject. The subject may be administered any of the described compositions, including pharmaceutical compositions.

[0829] In some embodiments, an AAV particle described herein, e.g., an AAV particle encoding an siRNA for targeting MAPT described herein, is administered via intravenous administration. In some embodiments, an AAV particle described herein, e.g., an AAV particle encoding an siRNA for targeting MAPT described herein, is administered via intracisternal magna administration.

[0830] The pharmaceutical compositions of AAV particles described herein may be characterized by one or more of bioavailability, therapeutic window and/or volume of distribution.

### III. ADMINISTRATION AND DOSING

### Administration

[0831] The AAV particles comprising a nucleic acid sequence encoding the siRNA molecules of the present disclosure may be administered by any route which results in a therapeutically effective outcome. These include, but are not limited to, within the parenchyma of an organ such as, but not limited to, a brain (e.g., intraparenchymal), spinal cord (intraparenchymal), corpus striatum (intrastriatal), enteral (into the intestine), gastroenteral, epidural, oral (by way of the mouth), transdermal, peridural, intracerebral (into the cerebrum), intracerebroventricular (into the cerebral ventricles), subpial (under the pia), epicutaneous (application onto the skin), intradermal, (into the skin itself), subcutaneous (under the skin), nasal administration (through the nose), intravenous (into a vein), intravenous bolus, intravenous drip, intraarterial (into an artery), intramuscular (into a muscle), intracardiac (into the heart), intraosseous infusion (into the bone marrow), intrathecal (into the spinal canal), intraganglionic (into the ganglion), intraperitoneal, (infusion or injection into the peritoneum), intravesical infusion, intravitreal, (through the eye), intracavernous injection (into a pathologic cavity) intracavitary (into the base of the penis), intravaginal administration, intrauterine, extra-amniotic administration, transdermal (diffusion through the intact skin for systemic distribution), transmucosal (diffusion through a mucous membrane), transvaginal, insufflation (snorting), sublingual, sublabial, enema, eye drops (onto the conjunctiva), in ear drops, auricular (in or by way of the ear), buccal (directed toward the cheek), conjunctival, cutaneous, dental (to a tooth or teeth), electro-osmosis, endocervical, endosinusial, endotracheal, extracorporeal, hemodialysis, infiltration, interstitial, intra-abdominal, intra-amniotic, intra-articular, intrabiliary, intrabronchial, intrabursal, intracartilaginous (within a cartilage), intracaudal (within the cauda equine), intracisternal (within the cisterna magna cerebellomedularis), intracorneal (within the cornea), dental intracornal, intracoronary (within the coronary arteries), intracorporus cavernosum (within the dilatable spaces of the corporus cavernosa of the penis), intradiscal (within a disc), intraductal (within a duct of a gland), intraduodenal (within the duodenum), intradural (within or beneath the dura), intraepidermal (to the epidermis), intraesophageal (to the esophagus), intragastric (within the stomach), intragingival (within the gingivae), intraileal (within the distal portion of the small intestine), intralesional (within or introduced directly to a localized lesion), intraluminal (within a lumen of a tube), intralymphatic (within the lymph), intramedullary (within the marrow cavity of a bone), intrameningeal (within the meninges), intraocular (within the eye), intraovarian (within the ovary), intrapericardial (within the pericardium), intrapleural (within the pleura), intraprostatic (within the prostate gland), intrapulmonary (within the lungs or its bronchi), intrasinal (within the nasal or periorbital sinuses), intraspinal (within the vertebral column), intrasynovial (within the synovial cavity of a joint), intratendinous (within a tendon), intratesticular (within the testicle), intrathecal (within the cerebrospinal fluid at any level of the cerebrospinal axis), intrathoracic (within the thorax), intratubular (within the tubules of an organ), intratumor (within a tumor), intratympanic (within the aurus media), intravascular (within a vessel or vessels), intraventricular (within a ventricle), iontophoresis (by means of electric current where ions of soluble salts migrate into the tissues of the body), irrigation (to bathe or flush open wounds or body cavities), laryngeal (directly upon the larynx), nasogastric (through the nose and into the stomach), occlusive dressing technique (topical route administration which is then covered by a dressing which occludes the area), ophthalmic (to the external eye), oropharyngeal (directly to the mouth and pharynx), parenteral, percutaneous, periarticular, peridural, perineural, periodontal, rectal, respiratory (within the respiratory tract by inhaling orally or nasally for local or systemic effect), retrobulbar (behind the pons or behind the eyeball), soft tissue, subarachnoid, subconjunctival, submucosal, topical, transplacental (through or across the placenta), transtracheal (through the wall of the trachea), transtympanic (across or through the tympanic cavity), ureteral (to the ureter), urethral (to the urethra), vaginal, caudal block, diagnostic, nerve block, biliary perfusion, cardiac perfusion, photopheresis or spinal.

[0832] In specific embodiments, compositions of AAV particles comprising a nucleic acid sequence encoding the siRNA molecules of the present disclosure may be administered in a way which facilitates entry to cells of the central nervous system (e.g., cells of the brain and spinal cord). The cells of the brain may be localized within one or specific brain areas. Non-limiting examples of brain areas may be the frontal, temporal, or parietal lobes, basal ganglia, thalamus, cerebellum and brainstem.

[0833] In specific embodiments, compositions of AAV particles comprising a nucleic acid sequence encoding the siRNA molecules of the present disclosure may be administered in a way which facilitates the vectors or siRNA molecule to enter the central nervous system and penetrate into cortical neurons, hippocampal neurons, entorhinal neurons, cholinergic neurons, interneurons, dentate gyrus granule cells, glial cells, and oligodendrocytes.

[0834] In some embodiments, the AAV particles comprising a nucleic acid sequence encoding the siRNA molecules of the present disclosure may be administered by intramuscular (IM) injection. In some embodiments, the AAV particles comprising a nucleic acid sequence encoding the siRNA molecules of the present disclosure may be administered by intraperitoneal (IP) injection. In some embodiments, the AAV particles comprising a nucleic acid sequence encoding the siRNA molecules of the present disclosure may be administered by intracerebroventricular (ICV) injection. In some embodiments, the AAV particles comprising a nucleic acid sequence encoding the siRNA molecules of the present disclosure may be administered via intraparenchymal (IPa) injection into the spinal cord and/or brain. In some embodiments, the AAV particles comprising a nucleic acid sequence encoding the siRNA molecules of the present disclosure may be administered via intra-cisterna magna (ICM) injection. In some embodiments, the AAV particles comprising a nucleic acid sequence encoding the siRNA molecules of the present disclosure may be administered by via intrathecal (IT) injection. In some embodiments, the AAV particles comprising a nucleic acid sequence encoding the siRNA molecules of the present disclosure may be administered via subpial injection. In some embodiments, the AAV particles comprising a nucleic acid sequence encoding the siRNA molecules of the present disclosure may be administered via ICM injection and any other route of administration described herein. As a non-limiting example, the AAV particles comprising a nucleic acid sequence encoding the siRNA molecules of the present disclosure may be administered via combined ICM and IPa, e.g. intrathalamic, injection.

[0835] In some embodiments, an AAV particle described herein (e.g., an AAV particle comprising an AAV capsid polypeptide, e.g., an AAV capsid variant) may be administered to a subject by systemic administration. In some embodiments, the systemic administration is intravenous administration. In another embodiment, the systemic administration is intraarterial administration. In some embodiments, an AAV particle of the present disclosure may be administered to a subject by intravenous administration. In some embodiments, the intravenous administration may be achieved by subcutaneous delivery. In some embodiments, the AAV particle is administered to the subject via focused ultrasound (FUS), e.g., coupled with the intravenous administration of microbubbles (FUS-MB) or MRI-guided FUS coupled with intravenous administration, e.g., as described in Terstappen et al. (Nat Rov Drug Discovery, doi.org/10.1038/s41573-021-00139-y (2021)), the contents of which are incorporated herein by reference in its entirety. In some embodiments, the AAV particle, e.g., an AAV particle described herein, is administered to the subject intravenously. In some embodiments, the subject is a human.

[0836] In some embodiments, AAV particles that express siRNA duplexes of the present disclosure may be administered to a subject by peripheral injections (e.g., intravenous) and/or intranasal delivery. It was disclosed in the art that the peripheral administration of AAV particles for siRNA duplexes can be transported to the central nervous system, for example, to the neurons (e.g., U.S. Patent Publication Nos. 20100240739; and 20100130594; the content of each of which is incorporated herein by reference in their entirety).

[0837] In other embodiments, compositions comprising at least one AAV particle comprising a nucleic acid sequence encoding the siRNA molecules of the present disclosure may be administered to a subject by intracranial delivery (See, e.g., U.S. Pat. No. 8,119,611; the content of which is incorporated herein by reference in its entirety).

[0838] The AAV particle comprising a nucleic acid sequence encoding the siRNA molecules of the present disclosure may be administered in any suitable form, either as a liquid solution or suspension, as a solid form suitable for liquid solution or suspension in a liquid solution. The siRNA duplexes may be formulated with any appropriate and pharmaceutically acceptable excipient.

[0839] The AAV particle comprising a nucleic acid sequence encoding the siRNA molecules of the present disclosure may be administered in a therapeutically effective amount, e.g., an amount that is sufficient to alleviate and/or prevent at least one symptom associated with the disease, or provide improvement in the condition of the subject.

[0840] In some embodiments, the AAV particle may be administered to the CNS in a therapeutically effective amount to improve function and/or survival for a subject with AD, FTD, and/or DS.

[0841] In some embodiments, an siRNA for targeting MAPT; or AAV particle or pharmaceutical composition described herein comprising or encoding a siRNA for inhibiting MAPT can be administered or used to treat mild cognitive impairment (MCI), neurodegenerative disease, Alzheimer's disease (AD), frontotemporal dementia and parkinsonism linked to chromosome 17 (FTDP-17), frontotemporal lobar degeneration (FTLD), frontotemporal dementia (FTD), chronic traumatic encephalopathy (CTE), progressive supranuclear palsy (PSP), Down's syndrome, Pick's disease, corticobasal degeneration (CBD), corticobasal syndrome, amyotrophic lateral sclerosis (ALS), a prion disease, Creutzfeldt-Jakob disease (CJD), multiple system atrophy, tangle-only dementia, stroke, and progressive subcortical gliosis.

[0842] In some embodiments, an siRNA that targets MAPT described herein or an AAV particle comprising a payload, e.g., a siRNA that binds to MAPT described herein, can be used to treat a traumatic brain injury (TBI), e.g., as described in Edwards et al. “Traumatic Brain Injury Induces Tau Aggregation and Spreading,” J. Neurotrauma, 2020, 37(1):80-92, the contents of which are hereby incorporated by reference in their entirety.

[0843] In some embodiments, the AAV particle may be administered to a subject in a therapeutically effective amount for the siRNA duplexes or dsRNA to target cortical neurons. In another embodiment, the AAV particle may be administered to a subject in a therapeutically effective amount for the siRNA duplexes or dsRNA to target cholinergic neurons. In yet another embodiment, the AAV particle may be administered to a subject in a therapeutically effective amount for the siRNA duplexes or dsRNA to target interneurons. In yet another embodiment, the AAV particle may be administered to a subject in a therapeutically effective amount for the siRNA duplexes or dsRNA to target glial cells.

[0844] In some embodiments, the siRNA duplexes or dsRNA may target MAPT transcript and reduce the levels of RNA transcript and/or resultant protein product(s). As another non-limiting example, the siRNA duplexes or dsRNA target MAPT transcript and can suppress or inhibit or silence MAPT transcript and reduce tau mediated toxicity.

[0845] In some embodiments, the AAV particle may be administered via intracerebroventricular (ICV) injection in a therapeutically effective amount to transduce cortical neurons, interneurons, hippocampal neurons, entorhinal neurons, cholinergic neurons, and/or glial cells such as, but not limited to, oligodendrocytes and/or astrocytes. As a non-limiting example, the vector may be administered via intraventricular injection into the lateral ventricle.

[0846] In some embodiments, the AAV particle may be administered via intracisternal injection in a therapeutically effective amount to transduce cortical neurons, interneurons, hippocampal neurons, entorhinal neurons, cholinergic neurons, and/or glial cells such as, but not limited to, oligodendrocytes and/or astrocytes. As a non-limiting example, the vector may be administered via intraventricular injection into the cisterna magna. In some embodiments, the AAV particle may be administered using intrathecal (IT) infusion in a therapeutically effective amount to transduce cortical neurons, interneurons, hippocampal neurons, entorhinal neurons, cholinergic neurons, and/or glial cells such as, but not limited to, oligodendrocytes and/or astrocytes. As a non-limiting example, the vector may be administered into the lumbar spinal cord. In some embodiments, the AAV particle may be administered using intramuscular (IM) infusion in a therapeutically effective amount to transduce cortical neurons, interneurons, hippocampal neurons, entorhinal neurons, cholinergic neurons, and/or glial cells such as, but not limited to, oligodendrocytes and/or astrocytes. As a non-limiting example, the vector may be administered into the deltoid. In some embodiments, the AAV particle may be administered to the CNS in a therapeutically effective amount for the siRNA duplexes or dsRNA to target cells in various brain areas. As a non-limiting example, the brain areas may be the hippocampus, cortex, thalamus, brainstem, striatum, and cerebellum. In some embodiments, the AAV particle may be administered to the CNS in a therapeutically effective amount for the siRNA duplexes or dsRNA to target cells in the olfactory bulb. In some embodiments, the AAV particle may be administered to the CNS in a therapeutically effective amount for the siRNA duplexes or dsRNA to target cells in the liver.

[0847] In some embodiments, the AAV particle comprising a modulatory polynucleotide may be formulated. As a non-limiting example, the baricity and/or osmolality of the formulation may be optimized to ensure optimal drug distribution in the central nervous system or a region or component of the central nervous system.

[0848] In some embodiments, the AAV particle comprising a modulatory polynucleotide may be delivered to a subject via a single route administration. In some embodiments, the AAV particle comprising a modulatory polynucleotide may be delivered to a subject via a multi-site route of administration. A subject may be administered the AAV particle comprising a modulatory polynucleotide at 2, 3, 4, 5 or more than 5 sites. In some embodiments, a subject may be administered the AAV particle comprising a modulatory polynucleotide described herein using a bolus injection. In some embodiments, the efficacy of administration of the AAV particle comprising a modulatory polynucleotide using a bolus injection may be measured by monitoring the gene transfer to the spinal cord, brain stem, or cortex. The biodistribution and cellular tropism may be monitored by any methods known in the art, such as, but not limited to, immunostaining, and the vector genome levels may be measured by digital PCR.

[0849] In some embodiments, a subject may be administered the AAV particle comprising a modulatory polynucleotide described herein using sustained delivery over a period of minutes, hours or days. The infusion rate may be changed depending on the subject, distribution, formulation or another delivery parameter.

[0850] In some embodiments, the AAV particle described herein is administered via putamen and caudate infusion. As a non-limiting example, the dual infusion provides a broad striatal distribution as well as a frontal and temporal cortical distribution.

[0851] In some embodiments, an AAV particle or pharmaceutical composition described herein is administered intravenously.

[0852] In some embodiments, the selection of subjects for administration of the AAV particle described herein and/or the effectiveness of the dose, route of administration and/or volume of administration may be evaluated using imaging of the perivascular spaces (PVS) which are also known as Virchow-Robin spaces. PVS surround the arterioles and venules as they perforate brain parenchyma and are filled with cerebrospinal fluid (CSF)/interstitial fluid. PVS are common in the midbrain, basal ganglia, and centrum semiovale. While not wishing to be bound by theory, PVS may play a role in the normal clearance of metabolites and have been associated with worse cognition and several disease states including Parkinson's disease. PVS are usually normal in size but they can increase in size in a number of disease states. Potter et al. (Cerebrovasc Dis. 2015 January; 39(4):224-231; the contents of which are herein incorporated by reference in its entirety) developed a grading method where they studied a full range of PVS and rated basal ganglia, centrum semiovale and midbrain PVS. They used the frequency and range of PVS used by Mac and Lullich et al. (J Neurol Neurosurg Psychiatry. 2004 November; 75(11):1519-23; the contents of which are herein incorporated by reference in its entirety) and Potter et al. gave 5 ratings to basal ganglia and centrum semiovale PVS: 0 (none), 1 (1-10), 2 (11-20), 3 (21-40) and 4 (>40) and 2 ratings to midbrain PVS: 0 (non-visible) or 1 (visible). The user guide for the rating system by Potter et al. can be found at: sbirc.ed.ac.uk/documents/epvs-rating-scale-user-guide.pdf, the contents of which are hereby incorporated by reference in their entirety.

[0853] In some embodiments, administration of an siRNA or modulatory polynucleotide for targeting MAPT or an AAV viral genome encoding an siRNA or modulatory polynucleotide for targeting MAPT described herein results in a reduction of tau pathology, e.g., a decrease in a biomarker of tau pathology (e.g., 18F-flortaucipir, plasma ptau 181, or 18F-PM-PBB3), e.g., as measured by a PET scan or PET scan in combination with Braak neuropathological staging and/or serum biomarker staining.

### Dosing

[0854] The pharmaceutical compositions of the present disclosure may be administered to a subject using any amount effective for reducing, preventing and/or treating a disease and/or disorder. The exact amount required will vary from subject to subject, depending on the species, age, and general condition of the subject, the severity of the disease, the particular composition, its mode of administration, its mode of activity, and the like.

[0855] The compositions of the present disclosure are typically formulated in unit dosage form for ease of administration and uniformity of dosage. It will be understood, however, that the total daily usage of the compositions of the present disclosure may be decided by the attending physician within the scope of sound medical judgment. The specific therapeutic effectiveness for any particular patient will depend upon a variety of factors including the disorder being treated and the severity of the disorder; the activity of the specific compound employed; the specific composition employed; the age, body weight, general health, sex and diet of the patient; the time of administration, route of administration, and rate of excretion of the siRNA duplexes employed; the duration of the treatment; drugs used in combination or coincidental with the specific compound employed; and like factors well known in the medical arts.

[0856] As a non-limiting example, the dose may be determined based on the total volume of CSF of a subject. For example, cynomolgus monkeys have a total estimated cerebrospinal fluid (CSF) volume of approximately 6 to 12 mL and humans have a total estimated CSF of approximately 120 to 150 mL, a factor of at least 10 to 12-fold. Therefore, a factor of 10× to 12× may be used to determine a human dose based on the dose to a cynomolgus monkey. In some embodiments, the factor is 10×. In another embodiment the factor is 11×. In yet another embodiment, the factor is 12×. In yet another embodiment, the factor may be, but is not limited to, 10×, 10.1×, 10.2×, 10.3×, 10.4×, 10.5×, 10.6×, 10.7×, 10.8×, 10.9×, 11×, 11.1×, 11.2×, 11.3×, 11.4×, 11.5×, 11.6×, 11.7×, 11.8×, 11.9×, 12×, 12.1×, 12.2×, 12.3×, 12.4×, and 12.5×.

[0857] In some embodiments, the age and sex of a subject may be used to determine the dose of the compositions of the present disclosure. As a non-limiting example, a subject who is older may receive a larger dose (e.g., 5-10%, 10-20%, 15-30%, 20-50%, 25-50% or at least 1%, 2%, 3%, 4%, 5%, 10%, 20%, 30%, 40%, 50%, 60%, 70%, 80%, 90% or more than 90% more) of the composition as compared to a younger subject. As another non-limiting example, a subject who is younger may receive a larger dose (e.g., 5-10%, 10-20%, 15-30%, 20-50%, 25-50% or at least 1%, 2%, 3%, 4%, 5%, 10%, 20%, 30%, 40%, 50%, 60%, 70%, 80%, 90% or more than 90% more) of the composition as compared to an older subject. As yet another non-limiting example, a subject who is female may receive a larger dose (e.g., 5-10%, 10-20%, 15-30%, 20-50%, 25-50% or at least 1%, 2%, 3%, 4%, 5%, 10%, 20%, 30%, 40%, 50%, 60%, 70%, 80%, 90% or more than 90% more) of the composition as compared to a male subject. As yet another non-limiting example, a subject who is male may receive a larger dose (e.g., 5-10%, 10-20%, 15-30%, 20-50%, 25-50% or at least 1%, 2%, 3%, 4%, 5%, 10%, 20%, 30%, 40%, 50%, 60%, 70%, 80%, 90% or more than 90% more) of the composition as compared to a female subject

[0858] In some specific embodiments, the doses of AAV particles for delivering siRNA duplexes of the present disclosure may be adapted depending on the disease condition, the subject and the treatment strategy.

[0859] In some embodiments, delivery of the compositions in accordance with the present disclosure to cells comprises a rate of delivery defined by [VG/hour=mL/hour*VG/mL] wherein VG is vector genomes, VG/mL is composition concentration, and mL/hour is rate of prolonged delivery.

[0860] In some embodiments, delivery of compositions in accordance with the present disclosure to cells may comprise a total concentration per subject between about 1×10⁶ VG and about 1×10¹⁶ VG. In some embodiments, delivery may comprise a composition concentration of about 1×10⁶, 2×10⁶, 3×10⁶, 4×10⁶, 5×10⁶, 6×10⁶, 7×10⁶, 8×10⁶, 9×10⁶, 1×10⁷, 2×10⁷, 3×10⁷, 4×10⁷, 5×10⁷, 6×10⁷, 7×10⁷, 8×10⁷, 9×10⁷, 1×10⁸, 2×10⁸, 3×10⁸, 4×10⁸, 5×10⁸, 6×10⁸, 7×10⁸, 8×10⁸, 9×10⁸, 1×10⁹, 2×10⁹, 3×10⁹, 4×10⁹, 5×10⁹, 6×10⁹, 7×10⁹, 8×10⁹, 9×10⁹, 1×10¹⁰, 2×10¹⁰, 3×10¹⁰, 4×10¹⁰, 5×10¹⁰, 6×10¹⁰, 7×10¹⁰, 8×10¹⁰, 9×10¹⁰, 1×10¹¹, 1.1×10¹¹, 1.2×10¹¹, 1.3×10¹¹, 1.4×10¹¹, 1.5×10¹¹, 1.6×10¹¹, 1.7×10¹¹, 1.8×10¹¹, 1.9×10¹¹, 2×10¹¹, 2.1×10¹¹, 2.2×10¹¹, 2.3×10¹¹, 2.4×10¹¹, 2.5×10¹¹, 2.6×10¹¹, 2.7×10¹¹, 2.8×10¹¹, 2.9×10¹¹, 3×10¹¹, 4×10¹¹, 5×10¹¹, 6×10¹¹, 7×10¹¹. 7.1×10¹¹, 7.2×10¹¹, 7.3×10¹¹, 7.4×10¹¹, 7.5×10¹¹, 7.6×10¹¹, 7.7×10¹¹, 7.8×10¹¹, 7.9×10¹¹, 8×10¹¹, 9×10¹¹, 1×10¹², 1.1×10¹², 1.2×10¹², 1.3×10¹², 1.4×10¹², 1.5×10¹², 1.6×10¹², 1.7×10¹², 1.8×10¹², 1.9×10¹², 2×10¹², 2.1×10¹², 2.2×10¹², 2.3×10¹², 2.4×10¹², 2.5×10¹², 2.6×10¹², 2.7×10¹², 2.8×10¹², 2.9×10¹², 3×10¹², 3.1×10¹², 3.2×10¹², 3.3×10¹², 3.4×10¹², 3.5×10¹², 3.6×10¹², 3.7×10¹², 3.8×10¹², 3.9×10¹², 4×10¹², 4.1×10¹², 4.2×10¹², 4.3×10¹², 4.4×10¹², 4.5×10¹², 4.6×10¹², 4.7×10¹², 4.8×10¹², 4.9×10¹², 5×10¹², 6×10¹², 6.1×10¹², 6.2×10¹², 6.3×10¹² 6.4×10¹², 6.5×10¹², 6.6×10¹², 6.7×10¹², 6.8×10¹², 6.9×10¹², 7×10¹², 8×10¹², 8.1×10¹², 8.2×10¹², 8.3×10¹². 8.4×10¹², 8.5×10¹², 8.6×10¹², 8.7×10¹², 8.8×10¹², 8.9×10¹², 9×10¹², 1×10¹³, 1.1×10¹³, 1.2×10¹³, 1.3×10¹³, 1.4×10¹³, 1.5×10¹³, 1.6×10¹³, 1.7×10¹³, 1.8×10¹³, 1.9×10¹³, 2×10¹³, 3×10¹³, 4×10¹³, 5×10¹³, 6×10¹³, 6.7×10¹³, 7×10¹³, 8×10¹³, 9×10¹³, 1×10¹⁴, 2×10¹⁴, 3×10¹⁴, 4×10¹⁴, 5×10¹⁴, 6×10¹⁴, 7×10¹⁴, 8×10¹⁴, 9×10¹⁴, 1×10¹⁵, 2×10¹⁵, 3×10¹⁵, 4×10¹⁵, 5×10¹⁵, 6×10¹⁵, 7×10¹⁵, 8×10¹⁵, 9×10¹⁵, or 1×10¹⁶ VG/subject.

[0861] In some embodiments, delivery of compositions in accordance with the present disclosure to cells may comprise a total concentration per subject between about 1×10⁶ VG/kg and about 1×10¹⁶ VG/kg. In some embodiments, delivery may comprise a composition concentration of about 1×10⁶, 2×10⁶, 3×10⁶, 4×10⁶, 5×10⁶, 6×10⁶, 7×10⁶, 8×10⁶, 9×10⁶, 1×10⁷, 2×10⁷, 3×10⁷, 4×10⁷, 5×10⁷, 6×10⁷, 7×10⁷, 8×10⁷, 9×10⁷, 1×10⁸, 2×10⁸, 3×10⁸, 4×10⁸, 5×10⁸, 6×10⁸, 7×10⁸, 8×10⁸, 9×10⁸, 1×10⁹, 2×10⁹, 3×10⁹, 4×10⁹, 5×10⁹, 6×10⁹, 7×10⁹, 8×10⁹, 9×10⁹, 1×10¹⁰, 2×10¹⁰, 3×10¹⁰, 4×10¹⁰, 5×10¹⁰, 6×10¹⁰, 7×10¹⁰, 8×10¹⁰, 9×10¹⁰, 1×10¹¹, 1.1×10¹¹, 1.2×10¹¹, 1.3×10¹¹, 1.4×10¹¹, 1.5×10¹¹, 1.6×10¹¹, 1.7×10¹¹, 1.8×10¹¹, 1.9×10¹¹, 2×10¹¹, 2.1×10¹¹, 2.2×10¹¹, 2.3×10¹¹, 2.4×10¹¹, 2.5×10¹¹, 2.6×10¹¹, 2.7×10¹¹, 2.8×10¹¹, 2.9×10¹¹, 3×10¹¹, 4×10¹¹, 5×10¹¹, 6×10¹¹, 7×10¹¹, 7.1×10¹¹, 7.2×10¹¹, 7.3×10¹¹, 7.4×10¹¹, 7.5×10¹¹, 7.6×10¹¹, 7.7×10¹¹, 7.8×10¹¹, 7.9×10¹¹, 8×10¹¹, 9×10¹¹, 1×10¹², 1.1×10¹², 1.2×10¹², 1.3×10¹², 1.4×10¹², 1.5×10¹², 1.6×10¹², 1.7×10¹², 1.8×10¹², 1.9×10¹², 2×10¹², 2.1×10¹², 2.2×10¹², 2.3×10¹², 2.4×10¹², 2.5×10¹², 2.6×10¹², 2.7×10¹², 2.8×10¹², 2.9×10¹², 3×10¹², 3.1×10¹², 3.2×10¹², 3.3×10¹², 3.4×10¹², 3.5×10¹², 3.6×10¹², 3.7×10¹², 3.8×10¹², 3.9×10¹², 4×10¹², 4.1×10¹², 4.2×10¹², 4.3×10¹², 4.4×10¹², 4.5×10¹², 4.6×10¹², 4.7×10¹², 4.8×10¹², 4.9×10¹², 5×10¹², 6×10¹², 6.1×10¹², 6.2×10¹², 6.3×10¹², 6.4×10¹², 6.5×10¹², 6.6×10¹², 6.7×10¹², 6.8×10¹², 6.9×10¹², 7×10¹², 8×10¹², 8.1×10¹², 8.2×10¹², 8.3×10¹², 8.4×10¹², 8.5×10¹², 8.6×10¹², 8.7×10¹², 8.8×10¹², 8.9×10¹², 9×10¹², 1×10¹³, 1.1×10¹³, 1.2×10¹³, 1.3×10¹³, 1.4×10¹³, 1.5×10¹³, 1.6×10¹³, 1.7×10¹³, 1.8×10¹³, 1.9×10¹³, 2×10¹³, 3×10¹³, 4×10¹³, 5×10¹³, 6×10¹³, 6.7×10¹³. 7×10¹³, 8×10¹³, 9×10¹³, 1×10¹⁴, 2×10¹⁴, 3×10¹⁴, 4×10¹⁴, 5×10¹⁴, 6×10¹⁴, 7×10¹⁴, 8×10¹⁴, 9×10¹⁴, 1×10¹⁵, 2×10¹⁵, 3×10¹⁵, 4×10¹⁵, 5×10¹⁵, 6×10¹⁵, 7×10¹⁵, 8×10¹⁵, 9×10¹⁵, or 1×10¹⁶ VG/kg.

[0862] In some embodiments, about 10⁵ to 10⁶ vector genome (unit) may be administered per dose.

[0863] In some embodiments, delivery of the compositions in accordance with the present disclosure to cells may comprise a total concentration between about 1×10⁶ VG/mL and about 1×10¹⁶ VG/mL. In some embodiments, delivery may comprise a composition concentration of about 1×10⁶, 2×10⁶, 3×10⁶, 4×10⁶, 5×10⁶, 6×10⁶, 7×10⁶, 8×10⁶, 9×10⁶, 1×10⁷, 2×10⁷, 3×10⁷, 4×10⁷, 5×10⁷, 6×10⁷, 7×10⁷, 8×10⁷, 9×10⁷, 1×10⁸, 2×10⁸, 3×10⁸, 4×10⁸, 5×10⁸, 6×10⁸, 7×10⁸, 8×10⁸, 9×10⁸, 1×10⁹, 2×10⁹, 3×10⁹, 4×10⁹, 5×10⁹, 6×10⁹, 7×10⁹, 8×10⁹, 9×10⁹, 1×10¹⁰, 2×10¹⁰, 3×10¹⁰, 4×10¹⁰, 5×10¹⁰, 6×10¹⁰, 7×10¹⁰, 8×10¹⁰, 9×10¹⁰, 1×10¹¹, 1.1×10¹¹, 1.2×10¹¹, 1.3×10¹¹, 1.4×10¹¹, 1.5×10¹¹, 1.6×10¹¹, 1.7×10¹¹, 1.8×10¹¹, 1.9×10¹¹, 2×10¹¹, 3×10¹¹, 4×10¹¹, 5×10¹¹, 6×10¹¹, 7×10¹¹, 8×10¹¹, 9×10¹¹, 1×10¹², 1.1×10¹², 1.2×10¹², 1.3×10¹², 1.4×10¹², 1.5×10¹², 1.6×10¹², 1.7×10¹², 1.8×10¹², 1.9×10¹², 2×10¹², 2.1×10¹², 2.2×10¹², 2.3×10¹², 2.4×10¹², 2.5×10¹², 2.6×10¹², 2.7×10¹², 2.8×10¹², 2.9×10¹², 3×10¹², 3.1×10¹², 3.2×10¹², 3.3×10¹², 3.4×10¹², 3.5×10¹², 3.6×10¹², 3.7×10¹², 3.8×10¹², 3.9×10¹², 4×10¹², 4.1×10¹², 4.2×10¹², 4.3×10¹², 4.4×10¹², 4.5×10¹², 4.6×10¹², 4.7×10¹², 4.8×10¹², 4.9×10¹², 5×10¹², 6×10¹², 6.1×10¹², 6.2×10¹², 6.3×10¹², 6.4×10¹², 6.5×10¹², 6.6×10¹², 6.7×10¹², 6.8×10¹², 6.9×10¹², 7×10¹², 8×10¹², 9×10¹², 1×10¹³, 1.1×10¹³, 1.2×10¹³, 1.3×10¹³, 1.4×10¹³, 1.5×10¹³, 1.6×10¹³, 1.7×10¹³, 1.8×10¹³, 1.9×10¹³, 2×10¹³, 3×10¹³, 4×10¹³, 5×10¹³, 6×10¹³, 6.7×10¹³, 7×10¹³, 8×10¹³, 9×10¹³, 1×10¹⁴, 2×10¹⁴, 3×10¹⁴, 4×10¹⁴, 5×10¹⁴, 6×10¹⁴ 7×10¹⁴, 8×10¹⁴, 9×10¹⁴, 1×10¹⁵, 2×10¹⁵, 3×10¹⁵, 4×10¹⁵, 5×10¹⁵, 6×10¹⁵, 7×10¹⁵, 8×10¹⁵, 9×10¹⁵, or 1×10¹⁶ VG/mL.

[0864] In certain embodiments, the desired siRNA duplex dosage may be delivered using multiple administrations (e.g., two, three, four, five, six, seven, eight, nine, ten, eleven, twelve, thirteen, fourteen, or more administrations). When multiple administrations are employed, split dosing regimens such as those described herein may be used. As used herein, a “split dose” is the division of single unit dose or total daily dose into two or more doses, e.g., two or more administrations of the single unit dose. As used herein, a “single unit dose” is a dose of any modulatory polynucleotide therapeutic administered in one dose/at one time/single route/single point of contact, i.e., single administration event. As used herein, a “total daily dose” is an amount given or prescribed in a 24-hour period. It may be administered as a single unit dose. In some embodiments, the AAV particles comprising the modulatory polynucleotides of the present disclosure are administered to a subject in split doses. They may be formulated in buffer only or in a formulation described herein.

[0865] In some embodiments, the dose, concentration and/or volume of the composition described herein may be adjusted depending on the contribution of the thalamus to cortical and subcortical distribution after administration. The administration may be intracerebroventricular (ICV), intrathalamic, intraparenchymal into the spinal cord, subpial, and/or intrathecal administration.

[0866] In some embodiments, the dose, concentration and/or volume of the composition described herein may be adjusted depending on the cortical and neuraxial distribution following administration by intravenous, intracerebroventricular, intrathalamic, intraparenchymal into the spinal cord, subpial, and/or intrathecal delivery.

### IV. METHODS AND USES OF THE COMPOSITIONS OF THE DISCLOSURE

[0867] The present disclosure relates to modulatory polynucleotides, e.g., RNA or DNA molecules, which may be used as therapeutic agents as RNA interference mediated gene silencing can specifically inhibit targeted gene expression.

[0868] Described herein are double stranded RNA (dsRNA) molecules (e.g., small interfering RNA, siRNA) targeting MAPT mRNA, pharmaceutical compositions comprising such dsRNA molecules, as well as processes of their design. The present disclosure also provides methods of their use for inhibiting MAPT gene expression, MAPT transcript expression and/or MAPT protein production, which may be used for treating neurodegenerative disease, such as, but not limited to tauopathies, and other indications described here. Such indications may include, but are not limited to mild cognitive impairment (MCI), neurodegenerative disease, Alzheimer's disease (AD), frontotemporal dementia and parkinsonism linked to chromosome 17 (FTDP-17), frontotemporal lobar degeneration (FTLD), frontotemporal dementia (FTD), chronic traumatic encephalopathy (CTE), progressive supranuclear palsy (PSP), Down's syndrome, Pick's disease, corticobasal degeneration (CBD), corticobasal syndrome, amyotrophic lateral sclerosis (ALS), a prion disease, Creutzfeldt-Jakob disease (CJD), multiple system atrophy, tangle-only dementia, stroke, and progressive subcortical gliosis. As a non-limiting example, the tauopathy is Alzheimer's disease (AD). As a non-limiting example, the tauopathy is frontotemporal dementia (FTD). As a non-limiting example, the tauopathy is Frontotemporal dementia and parkinsonism linked to chromosome 17 (FTDP-17). As a non-limiting example, the tauopathy is progressive supranuclear palsy (PSP). As a non-limiting example, the tauopathy is central nervous system trauma. As a non-limiting example, the tauopathy is chronic traumatic encephalopathy (CTE). As a non-limiting example, the tauopathy is traumatic brain injury (TBI). As a non-limiting example, the tauopathy is prion disease. As a non-limiting example, the tauopathy is neurodegeneration. As a non-limiting example, the tauopathy is stroke. As a non-limiting example, the tauopathy is an epilepsy or a variant thereof, such as, but not limited to, Dravet syndrome (DS).

[0869] In particular, the AAV particles comprising modulatory polynucleotides comprising a nucleic acid sequence encoding the siRNA molecules of the present disclosure may be delivered into specific types of targeted cells, including neurons such as cortical neurons, hippocampal neurons (e.g., dentate gyrus granule cell neurons), entorhinal neurons, cholinergic neurons, and interneurons (e.g., inhibitory interneurons), or glial cells such as oligodendrocytes, astrocytes and microglia.

[0870] In some embodiments, the present disclosure provides methods for treating, or ameliorating Alzheimer's disease (AD), frontotemporal dementia (FTD), and/or Dravet syndrome (DS) associated with abnormal tau RNA and/or protein products in a subject in need of treatment, the method comprising administering to the subject a pharmaceutically effective amount of at least one siRNA duplex or a nucleic acid encoding a siRNA duplex targeting the MAPT transcript, delivering said siRNA duplex (or encoded duplex) into targeted cells, inhibiting MAPT transcript expression and production of toxic proteins, and ameliorating symptoms of AD and/or FTD in the subject.

[0871] In some embodiments, the siRNA molecules or the AAV particles encoding such siRNA molecules may be introduced directly into the central nervous system of the subject, for example, by intraparenchymal (IPa), subpial, intrathecal, intracranial injection or intravenous (IV) administration.

[0872] In some embodiments, the pharmaceutical composition of the present disclosure is used as a solo therapy. In other embodiments, the pharmaceutical composition of the present disclosure is used in combination therapy. By “in combination with,” it is not intended to imply that the agents must be administered at the same time and/or formulated for delivery together, although these methods of delivery are within the scope of the present disclosure. Compositions can be administered concurrently with, prior to, or subsequent to, one or more other desired therapeutics or medical procedures. In general, each agent will be administered at a dose and/or on a time schedule determined for that agent.

[0873] The combination therapy may be in combination with one or more neuroprotective agents such as small molecule compounds, growth factors and hormones which have been tested for their neuroprotective effect on neuron degeneration.

[0874] In some embodiments, the present disclosure provides methods for treating, or ameliorating Alzheimer's disease (AD), frontotemporal dementia (FTD), and/or Dravet syndrome (DS) by administering to a subject in need thereof a therapeutically effective amount of an siRNA or AAV particle described herein.

### Alzheimer's Disease

[0875] Alzheimer Disease (AD) is a debilitating neurodegenerative disease currently afflicting more than 35 million people worldwide, with that number expected to double in coming decades. Symptomatic treatments have been available for many years, but these treatments do not address the underlying pathophysiology. Recent clinical trials using these and other treatments have largely failed and, to date, no known cure has been identified.

[0876] The AD brain is characterized by the presence of two forms of pathological aggregates, the extracellular plaques composed of β-amyloid (Aβ) and the intracellular neurofibrillary tangles (NFT) comprised of hyperphosphorylated microtubule associated protein tau. Based on early genetic findings, β-amyloid alterations were thought to initiate disease, with changes in tau considered downstream. Thus, most clinical trials have been Aβ-centric. Although no mutations of the MAPT gene have been linked to AD, such alterations have been shown to result in a family of dementias known as tauopathies, demonstrating that changes in tau can contribute to neurodegenerative processes. Tau is normally a very soluble protein known to associate with microtubules based on the extent of its phosphorylation. Hyperphosphorylation of tau depresses its binding to microtubules and microtubule assembly activity. In tauopathies, the tau becomes hyperphosphorylated, misfolds and aggregates as NFT of paired helical filaments (PHF), twisted ribbons or straight filaments. In AD, NFT pathology, rather than plaque pathology, correlates more strongly with neuropathological markers such as neuronal loss, synaptic deficits, severity of disease and cognitive decline. NFT pathology marches through the brain in a stereotyped manner and animal studies suggest a trans-cellular propagation mechanism along neuronal connections.

[0877] Several approaches have been proposed for therapeutically interfering with the progression of tau pathology to prevent or hasten downstream molecular, cellular, and/or cognitive consequences. Given that NFT are composed of hyperphosphorylated, misfolded and aggregated tau, each pathological form has yielded a set of avidly pursued targets. Tau reduction has also been a goal of many treatment strategies as continued- or over-production of tau, and specifically mutant tau, may exacerbate disease progression, e.g., by contributing to already impaired neuronal trafficking processes, or accelerating NFT formation. Introducing agents that limit phosphorylation, block misfolding, prevent aggregation, or reduce tau expression have all generated promising results, however the success of these strategies has been limited. As such, there is presently no known effective treatment for tauopathies. Thus, there remains a need in the art for effectively reducing, preventing and/or treating tauopathies.

[0878] The delivery of vectored RNAi targeting MAPT of present disclosure may be used to treat subjects suffering from AD and other tauopathies. In some cases, methods of the present disclosure may be used to treat subjects suspected of developing AD or other tauopathies.

### Frontotemporal Dementia

[0879] Frontotemporal dementia (FTD), also referred to as frontotemporal lobar degeneration (FTLD), is a neurological condition often associated with AD. FTD represents a group of brain disorders that result from the progressive degeneration of the temporal and frontal lobes of the brain. FTD is the second most common form of early-onset (<65 years) dementia after Alzheimer's disease (AD). Common signs and symptoms of FTD include significant changes in behavior and personality (such as lack of judgment and inhibition, apathy, and repetitive compulsive behavior), impairment or loss of speech and language function, and movement disorders (such as rigidity, muscle spasms and muscle weakness).

[0880] The prevalence of FTD in the United States was estimated to around 60,000 cases (Knopman and Roberts. J Mol Neurosci. 2011; 45(3):330-5). Signs and symptoms typically manifest in late adulthood, more commonly between the ages of 45 and 65, approximately equally affecting men and women. The course of the disease ranges from 2 to over 20 years, with a mean course of 8 years from the onset of symptoms.

[0881] Clinicopathological and genetic data have long supported the concept that AD and FTD may represent an overlapping continuum of disease with a shared underlying pathogenesis (Lillo and Hodges, J Clin Neurosci. 2009; 16(9):1131-5; Neumann et al., Science. 2006; 314(5796):130-3). They often co-occur in a family, and the prevalence of frontal lobe impairment in AD populations may approach 50%. Similarly, as many as half of FTD patients develop clinical symptoms of motor neuron dysfunction (Blitterswijk et al., Curr Opin Neurol. 2012; 25(6):689-700). Both diseases commonly show accumulations of abnormal proteins including the DNA/RNA binding protein TDP-43 (Neumann et al., Science. 2006; 314(5796):130-3).

### Frontotemporal Dementia and Parkinsonism Linked to Chromosome 17

[0882] Although Alzheimer's disease is, in part, characterized by the presence of tau pathology, no known mutations in the MAPT gene have been causally linked to the disease. Mutations in the MAPT gene have been shown to lead to an autosomal dominantly inherited tauopathy known as frontotemporal dementia and parkinsonism linked to chromosome 17 (FTDP-17) and demonstrate that alterations in tau can lead to neurodegenerative changes in the brain. Mutations in the MAPT gene that lead to FTDP-17 are thought to influence splicing patterns, thereby leading to an elevated proportion of tau with four microtubule binding domains (rather than three). These molecules are considered to be more amyloidogenic, meaning they are more likely to become hyperphosphorylated and more likely to aggregate into NFT (Hutton, M. et al., 1998, Nature 393(6686):702-5). Although physically and behaviorally, FTDP-17 patients can appear quite similar to Alzheimer's disease patients, at autopsy FTDP-17 brains lack the prominent AB plaque pathology of an AD brain (Gotz, J. et al., 2012, British Journal of Pharmacology 165(5):1246-59). Therapeutically targeting tau protein may ameliorate and prevent degenerative changes in the brain and potentially lead to improved cognitive ability.

[0883] As of today, there is no treatment to prevent, slow the progression, or cure FTDP-17. Medication may be prescribed to reduce aggressive, agitated or dangerous behavior. There remains a need for therapy affecting the underlying pathophysiology, such as RNAi therapies targeting tau protein.

[0884] In some embodiments, the vectored RNAi delivery of the present disclosure may be used to treat subjects suffering from FTDP-17. In some cases, methods of the present disclosure may be used to treat subjects suspected of developing FTDP-17.

### Chronic Traumatic Encephalopathy

[0885] Unlike the genetically linked tauopathies, chronic traumatic encephalopathy (CTE) is a degenerative tauopathy linked to repeated head injuries. The disease was first described in boxers who behaved “punch drunk” and has since been identified primarily in athletes that engage in American football, ice hockey, wrestling and other contact sports. The brains of those suffering from CTE are characterized by distinctive patterns of brain atrophy accompanied by accumulation of hyperphosphorylated species of aggregated tau in NFT. In CTE, pathological changes in tau are accompanied by a number of other pathobiological processes, such as inflammation (Daneshvar, D. H. et al., 2015 Mol Cell Neurosci 66 (Pt B): 81-90). Targeting the tau may provide reprieve from the progression of the disease and may allow cognitive improvement.

[0886] As of today, there is no medical therapy to treat or cure CTE. The condition is only diagnosed after death, due to lack of in vivo techniques to identify CTE specific biomarkers. There remains a need for therapy affecting the underlying pathophysiology, such as vectored RNAi therapies targeting tau protein.

[0887] In some embodiments, the vectored RNAi delivery methods of the present disclosure may be used to treat subjects suffering from CTE. In some cases, methods of the present disclosure may be used to treat subjects suspected of developing CTE.

### Prion Diseases

[0888] Prion diseases, also known as transmissible spongiform encephalopathies (TSEs), are a group of rare progressive conditions affecting the nervous system. The related conditions are rare and are typically caused by mutations in the PRNP gene which enables production of the prion protein. Gene mutations lead to an abnormally structured prion protein. Alternatively, the abnormal prion may be acquired by exposure from an outside source, e.g. by consumption of beef products containing the abnormal prion protein. Abnormal prions are misfolded, causing the brain tissue to degenerate rapidly. Prion diseases include, but are not limited to, Creutzfeldt-Jakob disease (CJD), Gerstmann-Sträussler-Scheinker syndrome (GSS), fatal insomnia (FFI), variably protcase-sensitive prionopathy (VPSPr), and kuru. Prion diseases are rare. Approximately 350 cascs of prion diseases are diagnosed in the US annually.

[0889] CJD is a degenerative brain disorder characterized by problems with muscular coordination, personality changes including mental impairment, impaired vision, involuntary muscle jerks, weakness and eventually coma. The most common categories of CJD are sporadic, hereditary (familial) due to a genetic mutation, and acquired. Sporadic CJD is the most common form affecting people with no known risk factors for the disease. The acquired form of CJD is transmitted by exposure of the brain and nervous system tissue to the prion. As an example, variant CJD (vCDJ) is linked to a bovine spongiform encephalopathy (BSE), also known as a ‘mad cow’ disease. CJD is fatal and patients typically die within one year of diagnosis.

[0890] Prion diseases are associated with an infectious agent consisting of an alternative conformational isoform of the prion protein, PrPSc. PrPSc replication is considered to occur through an induction of the infectious prion in the normal prion protein (PrPC). The replication occurs without a nucleic acid.

[0891] As of today, there is no therapy to manage or cure CJD, or other prion diseases. Typically, treatment is aimed at alleviating symptoms and increasing comfortability of the patient, e.g. with pain relievers. There remains a need for therapy affecting the underlying pathophysiology, such as vectored RNAi therapies targeting the prion protein.

[0892] In some embodiments, vectored RNAi delivery methods of the present disclosure may be used to treat subjects suffering from a prion disease. In some cases, methods of the present disclosure may be used to treat subjects suspected of developing a prion disease.

### Neurodegeneration and Stroke

[0893] Neurodegenerative diseases and other diseases of the nervous system share many common features. Neurodegenerative diseases, in particular, are a group of conditions characterized by progressive loss of neuronal structure and/or function, ultimately leading to neuronal cell death. Neurons are the building blocks of the nervous system(s) and are generally unable to reproduce and/or be replaced, and therefore neuron damage and/or death is especially devastating. Other, non-degenerating diseases that lead to neuronal cell loss, such as stroke, have similarly debilitating outcomes. Targeting molecules that contribute to the deteriorating cell structure or function may prove beneficial generally for treatment of nervous system diseases, neurodegenerative disease and/or stroke.

[0894] Many neurodegenerative diseases are associated with aggregation of misfolded proteins, including, but not limited to, alpha synuclein, tau, amyloid β, prion proteins, TDP-43, and huntingtin (see, e.g. De Genst et al., 2014, Biochim Biophys Acta; 1844(11):1907-1919, and Yu et al., 2013, Neurotherapeutics.; 10(3):459-472, references therein). The aggregation results from disease-specific conversion of soluble proteins to an insoluble, highly ordered fibrillary deposit. This conversion is thought to prevent the proper disposal or degradation of the misfolded protein, thereby leading to further aggregation. In some embodiments, the vectored RNAi delivery of the present disclosure is utilized to target the aforementioned antigens (e.g., misfolded or aggregated proteins).

[0895] AAV Particles and methods of using the AAV particles described in the present disclosure may be used to prevent, manage and/or treat tauopathies. As a non-limiting example, the AAV particles of the present disclosure comprise a nucleic acid sequence encoding at least one of the sequences described in Table 5.

### Dravet Syndrome and Epilepsy

[0896] Dravet syndrome (DS), also known as severe myoclonic epilepsy of infancy (SMEI), is a type of early-onset epilepsy that manifests as intractable epilepsy and neurodevelopmental delays, with genetic basis in the mutation of the voltage-gated calcium channel, alpha-1 subunit (SCNIA) gene on chromosome 2q24 (see, e.g., Anwar et al., Cureus. 2019 June; 11(6): e5006 and Claes et al., Am J Hum Genet. 2001 June; 68(6):1327-32. Epub 2001 May 15, the contents of each of which are incorporated herein by reference in their entirety). While more than 90% of these mutations are thought to be de novo (sporadic), familial mutations (e.g., missense) account for only 5-10% of cases. DS is rare, with incidence estimated at 1 in 15000 to 1 in 40,000, arising in males and females in equal proportion (see, e.g., Wu at al., Pediatrics. 2015 November; 136(5): e1310-e1315; Rosander et al., Dev Med Child Neurol. 2015 July; 57(7):628-633; and, Hurst Epilepsia. 1990 July-August; 31(4):397-400, the contents of each of which are incorporated herein by reference in their entirety).

[0897] Age of onset for DS typically occurs in the first year of life at ~6 months (1-18 months, range) with 10-20% mortality by the age of 10 (Shmuely et al., Epilepsy Behav. 2016 November; 64(Pt A):69-74, the contents of which are incorporated herein by reference in their entirety). Indeed, it is estimated that 14-20% of DS patients succumb to sudden unexpected death in epilepsy (SUDEP), the cause of which is largely unknown, but that may be associated with cardiac or respiratory complications (Genton et al., 2011, Epilepsia. 2011 April; 52 Suppl 2:44-9 the contents of which are incorporated herein by reference in their entirety). During adulthood, DS commonly manifests as persistent motor and cognitive functions (see, e.g., Anwar et al., Cureus. 2019 June; 11(6): e5006, the contents of which are incorporated herein by reference in their entirety). Several different seizure categories have been identified in DS patients such as, but not limited to, convulsive, myoclonic, absence, focal, obtundation status, and tonic seizures. In addition to pleomorphic seizure activity, motor dysfunction may include ataxia, tremors, dysarthria, pyramidal, and extrapyramidal signs. Most patients also exhibit cognitive, visual and visuomotor, and language impairment. Psychiatric conditions including aggressiveness, agitation, obsessiveness, perseveration, and hoarding behavior may also occur in DS patients.

[0898] Due to its intractable nature, treatment options for DS are somewhat limited, but may include anti-epileptic drugs, cannabinoids, ketogenic diet therapy, and surgery (e.g., deep brain stimulation). Despite the development of a number antiepileptic drugs over the course of the past few decades, the efficacy of such treatments has not substantially improved, in particular, as several patients suffer from seizures that are drug-refractory (Pérez-Pérez et al., Epilepsy Behav. 2019 Aug. 1:106430, the contents of which are incorporated herein by reference in their entirety). DS is among the most drug-resistant forms of epilepsy (see, e.g., Chiron Dev Med Child Neurol. 2011 April; 53 Suppl 2:16-8, the contents of which are incorporated herein by reference in their entirety). Thus, there remains a need in the art for effectively reducing, preventing, and/or treating epilepsies or variants thereof, such as, but not limited to, DS and other intractable childhood epilepsies.

[0899] Several lines of evidence suggest that antiepileptic effects of tau reduction and/or ablation may offer a new avenue for the treatment of drug-resistant epilepsy. Indeed, the genetic ablation of tau has been shown to reduces hyperexcitability in AD mouse lines, induced seizure models, and genetic in vivo models of epilepsy alike. For instance, a ~50% reduction of tau by has been shown to improve survival, reduce seizure frequency, decrease neuronal hyperexcitability, and rescue behavioral impairment in a mouse model of DS (Gheyara et al., Ann Neurol. 2014 September; 76(3):443-56, the contents of which are incorporated herein by reference in their entirety). In two chemically induced seizure mouse models, antisense oligonucleotide (ASO)-mediated reduction of tau tightly tracked with attenuation of seizure severity (Devos et al., J Neurosci. 2013 Jul. 31; 33(31):12887-97, the contents of which are incorporated herein by reference in their entirety). Levels of tau protein in cerebrospinal fluid (CSF) has also been linked to epilepsy severity, including in both AD and epileptic patients (see, e.g., Tábuas-Pereira et al., Epilepsy Behav. 2019 September; 98 (Pt A): 207-209, the contents of which are incorporated herein by reference in their entirety). Though as yet not fully understood, possible contributing mechanisms to support of tau (MAPT) knockdown as a genetic modifier for epilepsy, include: enhanced activity of inhibitory neurons; reduced N-methyl-D-aspartate receptor (NMDAR)-dependent excitotoxicity; and, reduced mossy fiber sprouting (Roberson et al., J Neurosci. 2011 Jan. 12; 31(2):700-11; Miyamoto et al., Mol Neurodegener. 2017 May 19; 12(1):41; and, Cavarsan et al., Front Neurol. 2018 Nov. 30; 9:1023, the contents of each of which are incorporated herein by reference in their entirety). Together, tau reduction may be therapeutically beneficial for DS and other epilepsies, including those that frequently occur in AD.

[0900] In some embodiments, the vectored RNAi delivery methods of the present disclosure may be used to treat subjects suffering from DS, or other epilepsy or variant thereof. In some cases, methods of the present disclosure may be used to treat subjects suspected of developing DS, or other epilepsy or variant thereof.

### Animal Models

[0901] Vectored RNAi delivery methods of the present disclosure (e.g., delivery of the siRNA or the AAV particles of the present disclosure) may be used to inhibit or suppress expression of MAPT transcript in a subject, including a non-human animal. In some embodiments, the non-human animal may be a rodent, such as, but not limited to, a mouse. As a non-limiting example, the mouse may be a transgenic mouse. Non-limiting examples of a transgenic mice include htau, P301S, rTg4510, and rTgTauEC transgenic mice.

[0902] In some embodiments, delivery of the siRNA or AAV particles of the present disclosure may be used to prevent, manage and/or treat tauopathy in the P301S mouse model of tauopathy, as described by Allen et al., J Neurosci. 2002 Nov. 1; 22(21):9340-51, the contents of which are incorporated herein by reference in their entirety; or the htau mouse model of tauopathy, as described in Andorfer et al., J Neurochem. 2003 August; 86(3):582-90 and WO199620218, the contents of which are incorporated herein by reference in their entirety). In some embodiments, sarkosyl insoluble paired helical filament (PHF) tau, or like substance, from Alzheimer's disease (AD) and/or other tauopathy disease brain or biofluid, may be introduced, e.g., via injection, into a brain area, e.g. the hippocampus, of htau mice, using methods similar to those previously described by Hu et al., Alzheimer's Dement. 2016 October; 12(10):1066-1077 and Gerson et al., J Neurotrauma. 2016 Nov. 15; 33(22):2034-2043, the contents of each of which are incorporated herein by reference in their entirety. In some embodiments, aged htau mice may be monitored for the onset of cognitive deficits as previously described by Polydoro et al., 2009 and Geiszler et al., 2016 (Polydoro et al., J Neurosci. 2009 Aug. 26; 29(34):10741-9 and Geiszler et al., Neuroscience. 2016 Aug. 4; 329:98-111, the contents of each of which are incorporated herein by reference in their entirety). In some embodiments, tau immunoreactivity may be measured in the seeding and in the first and secondary synaptic brain areas using anti-tau antibodies, such as but not limited to the AT100 antibody (pSer²¹²/pSer²¹⁴; ThermoFisher, Waltham, MA; described in U.S. Pat. No. 6,121,003, the contents of which are herein incorporated in their entirety).

[0903] In some embodiments, brain lysate from mice may be tested for tau seeding activity using a biosensor as described by, e.g., Gui et al., Sensors (Basel). 2017 July; 17(7):1623 and Frost et al., J Biol Chem. 2009 May 8; 284(19):12845-52, the contents of each of which are incorporated herein by reference in their entirety; or Frost et al., J Biol Chem. 2009 May 8:284(19):12845-52, the contents of which are incorporated herein by reference in their entirety.

[0904] In some embodiments, delivery of the siRNA or AAV particles of the present disclosure may be used to inhibit or suppress expression of MAPT transcript in a subject, including a non-human animal. The non-human animal may be a non-human primate (NHP), such as but not limited to, a rhesus macaque (Macaca mulatta). In some embodiments, delivery of the siRNA or AAV particles of the present disclosure may be used to inhibit or suppress expression of MAPT transcript in non-human animals, such as but not limited to, htau mice, P301S mice, and/or NHPs.

### V. DEFINITIONS

[0905] Unless stated otherwise, the following terms and phrases have the meanings described below. The definitions are not meant to be limiting in nature and serve to provide a clearer understanding of certain aspects of the present disclosure.

[0906] Articles such as “a,” “an,” and “the” may mean one or more than one unless indicated to the contrary or otherwise evident from the context. Claims or descriptions that include “or” between one or more members of a group are considered satisfied if one, more than one, or all of the group members are present in, employed in, or otherwise relevant to a given product or process unless indicated to the contrary or otherwise evident from the context. The disclosure includes embodiments in which exactly one member of the group is present in, employed in, or otherwise relevant to a given product or process. The disclosure includes embodiments in which more than one, or the entire group members are present in, employed in, or otherwise relevant to a given product or process.

[0907] It is also noted that the term “comprising” is intended to be open and permits but does not require the inclusion of additional elements or steps. When the term “comprising” is used herein, the term “consisting of” and “consisting essentially thereof” is thus also encompassed and disclosed.

[0908] Where ranges are given, endpoints are included. Furthermore, it is to be understood that unless otherwise indicated or otherwise evident from the context and understanding of one of ordinary skill in the art, values that are expressed as ranges can assume any specific value or subrange within the stated ranges in different embodiments of the disclosure, to the tenth of the unit of the lower limit of the range, unless the context clearly dictates otherwise.

[0909] Adeno-associated virus (AAV): As used herein, the term “adeno-associated virus” or “AAV” refers to members of the dependovirus genus or a variant, e.g., a functional variant, thereof. In some embodiments, the AAV is wildtype, or naturally occurring. In some embodiments, the AAV is recombinant.

[0910] AAV Particle: As used herein, an “AAV particle” refers to an AAV capsid, e.g., an AAV capsid variant, and a polynucleotide, e.g., a viral genome. In some embodiments, the viral genome of the AAV particle comprises at least one payload region and at least one ITR. In some embodiments, an AAV particle of the disclosure is an AAV particle comprising an AAV variant. In some embodiments, the AAV particle is capable of delivering a nucleic acid, e.g., a payload region, encoding a payload to cells, typically, mammalian, e.g., human, cells. In some embodiments, an AAV particle of the present disclosure may be produced recombinantly. In some embodiments, an AAV particle may be derived from any serotype, described herein or known in the art, including combinations of serotypes (e.g., “pseudotyped” AAV) or from various genomes (e.g., single stranded or self-complementary). In some embodiments, the AAV particle may be replication defective and/or targeted. It is to be understood that reference to the AAV particle of the disclosure also includes pharmaceutical compositions thereof, even if not explicitly recited.

[0911] Amelioration: As used herein, the term “amelioration” or “ameliorating” refers to a lessening of severity of at least one indicator of a condition or disease. For example, in the context of neurodegeneration disorder, amelioration includes the reduction of neuron loss.

[0912] Antisense strand: As used herein, the term “antisense strand” or “the first strand” or “the guide strand” of a siRNA molecule refers to a strand that is substantially complementary to a target sequence. In some embodiments, the antisense strand is substantially complementary to a section of about 10-50 nucleotides, e.g., about 15-30, 16-25, 18-23 or 19-22 nucleotides of the mRNA of the gene targeted for silencing. In some embodiments, the antisense strand is sufficiently complementary to the desired target mRNA sequence to direct target-specific silencing, e.g., complementarity sufficient to trigger the destruction of the desired target mRNA by the RNAi machinery or process.

[0913] Approximately: As used herein, the term “approximately” or “about,” as applied to one or more values of interest, refers to a value that is similar to a stated reference value. When referring to a measurable value such as an amount, a temporal duration, and the like, the term is meant to encompass is meant to encompass variations of ±20% or in some instances±10%, or in some instances±5%, or in some instances ±1%, or in some instances±0.1% from the specified value, as such variations are appropriate to perform the disclosed methods.

[0914] Capsid: As used herein, the term “capsid” refers to the exterior, e.g., a protein shell, of a virus particle, e.g., an AAV particle, that is substantially (e.g., >50%, >90%, or 100%) protein. In some embodiments, the capsid is an AAV capsid comprising an AAV capsid protein described herein, e.g., a VP1, VP2, and/or VP3 polypeptide. The AAV capsid protein can be a wild-type AAV capsid protein or a variant, e.g., a structural and/or functional variant from a wild-type or a reference capsid protein, referred to herein as an “AAV capsid variant.” In some embodiments, the AAV capsid variant described herein has the ability to enclose, e.g., encapsulate, a viral genome and/or is capable of entry into a cell, e.g., a mammalian cell. In some embodiments, the AAV capsid variant described herein may have modified tropism compared to that of a wild-type AAV capsid, e.g., the corresponding wild-type capsid.

[0915] Complementary and substantially complementary: As used herein, the term “complementary” refers to the ability of polynucleotides to form base pairs with one another. Base pairs are typically formed by hydrogen bonds between nucleotide units in antiparallel polynucleotide strands. Complementary polynucleotide strands can form base pairs in the Watson-Crick manner (e.g., A to T, A to U, C to G), or in any other manner that allows for the formation of duplexes. As persons skilled in the art are aware, when using RNA as opposed to DNA, uracil rather than thymine is the base that is considered to be complementary to adenine. However, when a U is denoted in the context of the present disclosure, the ability to substitute a T is implied, unless otherwise stated. Perfect complementarity or 100% complementarity refers to the situation in which each nucleotide unit of one polynucleotide strand can form a hydrogen bond with a nucleotide unit of a second polynucleotide strand. Less than perfect complementarity refers to the situation in which some, but not all, nucleotide units of two strands can form hydrogen bond with each other. For example, for two 20-mers, if only two base pairs on each strand can form a hydrogen bond with each other, the polynucleotide strands exhibit 10% complementarity. In the same example, if 18 base pairs on each strand can form hydrogen bonds with each other, the polynucleotide strands exhibit 90% complementarity. The term “complementary” as used herein can encompass fully complementary, partially complementary, or substantially complementary. As used herein, the term “substantially complementary” means that the siRNA has a sequence (e.g., in the antisense strand) which is sufficient to bind the desired target mRNA, and to trigger the RNA silencing of the target mRNA. “Fully complementary”, “perfect complementarity”, or “100% complementarity” refers to the situation in which each nucleotide unit of one polynucleotide or oligonucleotide strand can base-pair with a nucleotide unit of a second polynucleotide or oligonucleotide strand.

[0916] Conservative amino acid substitution: As used herein, a “conservative amino acid substitution” is one in which the amino acid residue is replaced with an amino acid residue having a similar side chain. Families of amino acid residues having similar side chains have been defined in the art. These families include amino acids with basic side chains (e.g., lysine, arginine, histidine), acidic side chains (e.g., aspartic acid, glutamic acid), uncharged polar side chains (e.g., glycine, asparagine, glutamine, serine, threonine, tyrosine, cysteine), nonpolar side chains (e.g., alanine, valine, leucine, isolcucine, proline, phenylalanine, methionine, tryptophan), beta-branched side chains (e.g., threonine, valine, isoleucine) and aromatic side chains (e.g., tyrosine, phenylalanine, tryptophan, histidine).

[0917] Conserved: As used herein, the term “conserved” refers to nucleotides or amino acid residues of a polynucleotide sequence or polypeptide sequence, respectively, that are those that occur unaltered in the same position of two or more sequences being compared. Nucleotides or amino acids that are relatively conserved are those that are conserved amongst more related sequences than nucleotides or amino acids appearing elsewhere in the sequences.

[0918] In certain embodiments, two or more sequences are said to be “completely conserved” if they are 100% identical to one another. In certain embodiments, two or more sequences are said to be “highly conserved” if they are at least 70% identical, at least 80% identical, at least 90% identical, or at least 95% identical to one another. In certain embodiments, two or more sequences are said to be “highly conserved” if they are about 70% identical, about 80% identical, about 90% identical, about 95%, about 98%, or about 99% identical to one another. In certain embodiments, two or more sequences are said to be “conserved” if they are at least 30% identical, at least 40% identical, at least 50% identical, at least 60% identical, at least 70% identical, at least 80% identical, at least 90% identical, or at least 95% identical to one another. In certain embodiments, two or more sequences are said to be “conserved” if they are about 30% identical, about 40% identical, about 50% identical, about 60% identical, about 70% identical, about 80% identical, about 90% identical, about 95% identical, about 98% identical, or about 99% identical to one another. Conservation of sequence may apply to the entire length of a polynucleotide or polypeptide or may apply to a portion, region or feature thereof.

[0919] Encapsulate: As used herein, the term “encapsulate” means to enclose, surround or encase. As an example, a capsid protein, e.g., an AAV capsid variant, often encapsulates a viral genome. In some embodiments, encapsulate within a capsid, e.g., an AAV capsid variant, encompasses 100% coverage by a capsid, as well as less than 100% coverage, e.g., 95% or less. For example, gaps or discontinuities may be present in the capsid so long as the viral genome is retained in the capsid, e.g., prior to entry into a cell.

[0920] Effective amount: As used herein, the term “effective amount” of an agent is that amount sufficient to effect beneficial or desired results, for example, clinical results, and, as such, an “effective amount” depends upon the context in which it is being applied. For example, in the context of administering an agent that treats AD, an effective amount of an agent is, for example, an amount sufficient to achieve treatment, as defined herein, of AD, as compared to the response obtained without administration of the agent.

[0921] Expression: As used herein, “expression” of a nucleic acid sequence refers to production of an RNA template from a DNA sequence (e.g., by transcription). In some embodiments, expression further comprises one or more of: (1) processing of an RNA transcript (e.g., by splicing, editing, 5′ cap formation, and/or 3′ end processing); (2) translation of an RNA into a polypeptide or protein; and (3) post-translational modification of a polypeptide or protein.

[0922] Fragment: A “fragment,” as used herein, refers to a portion. For example, an antibody fragment may comprise a CDR, or a heavy chain variable region, or a scFv, etc. In some embodiments, a fragment is a nucleic acid fragment.

[0923] Homology: As used herein, the term “homology” refers to the overall relatedness between polymeric molecules, e.g. between polynucleotide molecules (e.g. DNA molecules and/or RNA molecules) and/or between polypeptide molecules. In certain embodiments, polymeric molecules are considered to be “homologous” to one another if their sequences are at least 25%, 30%, 35%, 40%, 45%, 50%, 55%, 60%, 65%, 70%, 75%, 80%, 85%, 90%, 95%, or 99% identical or similar. The term “homologous” necessarily refers to a comparison between at least two sequences (polynucleotide or polypeptide sequences). In accordance with the present disclosure, two polynucleotide sequences are considered to be homologous if the polypeptides they encode are at least about 50%, 60%, 70%, 80%, 90%, 95%, or even 99% for at least one stretch of at least about 20 amino acids. In certain embodiments, homologous polynucleotide sequences are characterized by the ability to encode a stretch of at least 4-5 uniquely specified amino acids. For polynucleotide sequences less than 60 nucleotides in length, homology is determined by the ability to encode a stretch of at least 4-5 uniquely specified amino acids. In accordance with the present disclosure, two protein sequences are considered to be homologous if the proteins are at least about 50%, 60%, 70%, 80%, or 90% identical for at least one stretch of at least about 20 amino acids.

[0924] Identity: As used herein, “identity” refers to the subunit sequence identity between two polymeric molecules, e.g., between two nucleic acid molecules, such as, two DNA molecules or two RNA molecules, or between two polypeptide molecules. When a subunit position in both of the two molecules is occupied by the same monomeric subunit; e.g., if a position in each of two DNA molecules is occupied by adenine, then they are identical at that position. The identity between two sequences is a direct function of the number of matching positions; e.g., if half (e.g., five positions in a polymer ten subunits in length) of the positions in two sequences are identical, the two sequences are 50% identical; if 90% of the positions (e.g., 9 of 10), are matched, the two sequences are 90% identical. Calculation of the percent identity of two polynucleotide sequences, for example, can be performed by aligning the two sequences for optimal comparison purposes (e.g., gaps can be introduced in one or both of a first and a second nucleic acid sequences for optimal alignment and non-identical sequences can be disregarded for comparison purposes). In certain embodiments, the length of a sequence aligned for comparison purposes is at least 30%, at least 40%, at least 50%, at least 60%, at least 70%, at least 80%, at least 90%, at least 95%, or 100% of the length of the reference sequence. The nucleotides at corresponding nucleotide positions are then compared. When a position in the first sequence is occupied by the same nucleotide as the corresponding position in the second sequence, then the molecules are identical at that position. The percent identity between the two sequences is a function of the number of identical positions shared by the sequences, taking into account the number of gaps, and the length of each gap, which needs to be introduced for optimal alignment of the two sequences. The comparison of sequences and determination of percent identity between two sequences can be accomplished using a mathematical algorithm. For example, the percent identity between two nucleotide sequences can be determined using methods such as those described in Computational Molecular Biology, Lesk, A. M., ed., Oxford University Press, New York, 1988; Biocomputing: Informatics and Genome Projects, Smith, D. W., ed., Academic Press, New York, 1993; Sequence Analysis in Molecular Biology, von Heinje, G., Academic Press, 1987; Computer Analysis of Sequence Data, Part I, Griffin, A. M., and Griffin, H. G., eds., Humana Press, New Jersey, 1994; and Sequence Analysis Primer, Gribskov, M. and Devereux, J., eds., M Stockton Press, New York, 1991; the contents of each of which are incorporated herein by reference in their entirety. For example, the percent identity between two nucleotide sequences can be determined using the algorithm of Meyers and Miller (CABIOS, 1989, 4:11-17), which has been incorporated into the ALIGN program (version 2.0) using a PAM120 weight residue table, a gap length penalty of 12 and a gap penalty of 4. The percent identity between two nucleotide sequences can, alternatively, be determined using the GAP program in the GCG software package using an NWSgapdna.CMP matrix. Methods commonly employed to determine percent identity between sequences include, but are not limited to those disclosed in Carillo, H., and Lipman, D., SIAM J Applied Math., 48:1073 (1988); incorporated herein by reference. Techniques for determining identity are codified in publicly available computer programs. Exemplary computer software to determine homology between two sequences include, but are not limited to, GCG program package, Devereux, J., et al., Nucleic Acids Research, 12(1), 387 (1984)), BLASTP, BLASTN, and FASTA Altschul, S. F. et al., J. Molec. Biol., 215, 403 (1990)).

[0925] Inhibit expression of a gene: As used herein, the phrase “inhibit expression of a gene” means to cause a reduction in the amount of an expression product of the gene. The expression product can be an RNA transcribed from the gene (e.g., an mRNA) or a polypeptide translated from an mRNA transcribed from the gene. Typically, a reduction in the level of an mRNA results in a reduction in the level of a polypeptide translated therefrom. The level of expression may be determined using standard techniques for measuring mRNA or protein.

[0926] Isolated: As used herein, the term “isolated” refers to a substance or entity that is altered or removed from the natural state, e.g., altered or removed from at least some of the components with which it is associated in the natural state. For example, a nucleic acid or a peptide naturally present in a living animal is not “isolated,” but the same nucleic acid or peptide partially or completely separated from the coexisting materials of its natural state is “isolated.” An isolated nucleic acid or protein can exist in substantially purified form, or can exist in a non-native environment such as, for example, a host cell. Such polynucleotides could be part of a vector and/or such polynucleotides or polypeptides could be part of a composition, and still be isolated in that such vector or composition is not part of the environment in which it is found in nature. In some embodiments, an isolated nucleic acid is recombinant or may be incorporated into a vector.

[0927] MicroRNA (miRNA) binding site: As used herein, a “miR binding site” comprises a nucleic acid sequence (whether RNA or DNA, e.g., differ by “U” of RNA or “T” in DNA) that is capable of binding, or binds, in whole or in part to a microRNA (miR), e.g., through complete or partial hybridization. Typically, such binding occurs between the miR and the miR binding site in the reverse complement orientation. In some embodiments, the miR binding site is transcribed from the AAV viral genome encoding the miR binding site.

[0928] In some embodiments, a miR binding site may be encoded or transcribed in series. Such a “miR binding site series” or “miR BSs” may include two or more miR binding sites having the same or different nucleic acid sequence.

[0929] Spacer: As used here, a “spacer” is generally any selected nucleic acid sequence of, e.g., 1, 2, 3, 4, 5, 6, 7, 8, 9, or 10 nucleotides in length, which is located between two or more consecutive miR binding site sequences. Spacers may also be more than 10 nucleotides in length, e.g., 20, 30, 40, or 50 or more than 50 nucleotides.

[0930] Modulatory polynucleotide: As used herein, a “modulatory polynucleotide” is any nucleic acid sequence(s) which functions to modulate (either increase or decrease) the level or amount of a target gene expression, transcript expression and/or protein production.

[0931] Neurological disease: As used herein, a “neurological disease” is any disease associated with the central or peripheral nervous system and components thereof (e.g., neurons).

[0932] Nucleic Acid: “nucleic acid,” “nucleic acid molecule,” “polynucleotide,” or “polynucleotide molecule” refers to deoxyribonucleic acids (DNA) or ribonucleic acids (RNA) and polymers thereof in either single- or double-stranded form. Unless specifically limited, the term encompasses nucleic acids containing known analogues of natural nucleotides that have similar binding properties as the reference nucleic acid and are metabolized in a manner similar to naturally occurring nucleotides. In some embodiments, a “nucleic acid,” “nucleic acid molecule,” “polynucleotide,” or “polynucleotide molecule” comprise a nucleotide/nucleoside derivative or analog. Unless otherwise indicated, a particular nucleic acid sequence also implicitly encompasses conservatively modified variants thereof (for example, degenerate codon substitutions, for example, conservative substitutions), alleles, orthologs, SNPs, and complementary sequences as well as the sequence explicitly indicated. Specifically, degenerate codon substitutions, for example, conservative substitutions may be achieved by generating sequences in which the third position of one or more selected (or all) codons is substituted with mixed-base and/or deoxyinosine residues (Batzer et al., Nucleic Acid Res. 19:5081 (1991); Ohtsuka et al., J. Biol. Chem. 260:2605-2608 (1985); and Rossolini et al., Mol. Cell. Probes 8:91-98 (1994))

[0933] Payload region: As used herein, a “payload region” is any nucleic acid sequence (e.g., within the viral genome) which encodes one or more “payloads” of the disclosure. As non-limiting examples, a payload region may be a nucleic acid sequence within the viral genome of an AAV particle, which encodes a payload, wherein the payload is an RNAi agent or a polypeptide. Payloads of the present disclosure may be, but are not limited to, peptides, polypeptides, proteins, antibodies, RNAi agents, etc.

[0934] Polypeptide: As used herein, “polypeptide” means a polymer of amino acid residues (natural or unnatural) linked together most often by peptide bonds. The term, as used herein, refers to proteins, polypeptides, and peptides of any size, structure, or function. If the polypeptide is a peptide, it will be at least about 2, 3, 4, or at least 5 amino acid residues long. Thus, polypeptides include gene products, naturally occurring polypeptides, synthetic polypeptides, homologs, orthologs, paralogs, fragments and other equivalents, variants, and analogs of the foregoing. A polypeptide may be a single molecule or may be a multi-molecular complex such as a dimer, trimer or tetramer. They may also comprise single chain or multichain polypeptides and may be associated or linked. The term polypeptide may also apply to amino acid polymers in which one or more amino acid residues are an artificial chemical analogue of a corresponding naturally occurring amino acid.

[0935] Polypeptide variant: The term “polypeptide variant” refers to molecules which differ in their amino acid sequence from a native or reference sequence. The amino acid sequence variants may possess substitutions, deletions, and/or insertions at certain positions within the amino acid sequence, as compared to a native or reference sequence. In some embodiments, a variant comprises a sequence having at least about 50%, at least about 80%, or at least about 90%, identical (homologous) to a native or a reference sequence.

[0936] Peptide: As used herein, “peptide” is less than or equal to 50 amino acids long, e.g., about 5, 10, 15, 20, 25, 30, 35, 40, 45, or 50 amino acids long.

[0937] Pharmaceutically acceptable: The phrase “pharmaceutically acceptable” is employed herein to refer to those compounds, materials, compositions, and/or dosage forms which are, within the scope of sound medical judgment, suitable for use in contact with the tissues of human beings and animals without excessive toxicity, irritation, allergic response, or other problem or complication, commensurate with a reasonable benefit/risk ratio.

[0938] Preventing: As used herein, the term “preventing” or “prevention” refers to partially or completely delaying onset of an infection, disease, disorder and/or condition; partially or completely delaying onset of one or more symptoms, features, or clinical manifestations of a particular infection, disease, disorder, and/or condition; partially or completely delaying onset of one or more symptoms, features, or manifestations of a particular infection, disease, disorder, and/or condition; partially or completely delaying progression from an infection, a particular disease, disorder and/or condition; and/or decreasing the risk of developing pathology associated with the infection, the disease, disorder, and/or condition.

[0939] Region: As used herein, the term “region” refers to a zone or general area. In some embodiments, when referring to a protein or protein module, a region may comprise a linear sequence of amino acids along the protein or protein module or may comprise a three-dimensional area, an epitope and/or a cluster of epitopes. In some embodiments, regions comprise terminal regions. As used herein, the term “terminal region” refers to regions located at the ends or termini of a given agent. When referring to proteins, terminal regions may comprise N- and/or C-termini.

[0940] In some embodiments, when referring to a polynucleotide, a region may comprise a linear sequence of nucleic acids along the polynucleotide or may comprise a three-dimensional area, secondary structure, or tertiary structure. In some embodiments, regions comprise terminal regions. As used herein, the term “terminal region” refers to regions located at the ends or termini of a given agent. When referring to polynucleotides, terminal regions may comprise 5′ and/or 3′ termini.

[0941] RNA/DNA: As used herein, the term “RNA” or “RNA molecule” or “ribonucleic acid molecule” refers to a polymer of ribonucleotides; the term “DNA” or “DNA molecule” or “deoxyribonucleic acid molecule” refers to a polymer of deoxyribonucleotides. In some embodiments, DNA and RNA can be synthesized naturally, e.g., by DNA replication and transcription of DNA, respectively; or be chemically synthesized. DNA and RNA can be single-stranded (i.e., ssRNA or ssDNA, respectively) or multi-stranded (e.g., double stranded, i.e., dsRNA and dsDNA, respectively).

[0942] RNA interfering: As used herein, the term “RNA interfering” or “RNAi” refers to a sequence specific regulatory mechanism that mediates cleavage of an RNA transcript, e.g., via an RNA-induced silencing complex (RISC) pathway. In some embodiments RNAi is mediated by RNA molecules which results in the inhibition or interfering or “silencing” of the expression of a corresponding protein-coding gene. In some embodiments, RNAi is controlled by the RNA-induced silencing complex (RISC) and is initiated by short/small dsRNA molecules in cell cytoplasm, where they interact with the catalytic RISC component argonaute. In some embodiments, dsRNA molecules can be introduced into cells exogenously. In some embodiments, exogenous dsRNA initiates RNAi by activating the ribonuclease protein Dicer, which binds and cleaves dsRNAs to produce double-stranded fragments of 21-25 base pairs with a few unpaired overhang bases on each end, e.g., small interfering RNAs (siRNAs).

[0943] Sample: As used herein, the term “sample” or “biological sample” refers to a subset of its tissues, cells, nucleic acids, or component parts (e.g., body fluids, including but not limited to blood, serum, mucus, lymphatic fluid, synovial fluid, cerebrospinal fluid, saliva, amniotic fluid, amniotic cord blood, urine, vaginal fluid, and semen).

[0944] Self-complementary viral particle: As used herein, a “self-complementary viral particle” is a particle included of at least two components, a protein capsid and a polynucleotide sequence encoding a self-complementary genome enclosed within the capsid.

[0945] Sense Strand: As used herein, the term “sense strand” or “second strand” or “passenger strand” or “sense sequence” of a siRNA molecule refers to a strand that is complementary to the antisense strand. In some embodiments, the antisense and sense strands of a siRNA molecule are hybridized to form a duplex structure, e.g., an siRNA.

[0946] Short interfering RNA or siRNA: As used herein, the terms “short interfering RNA,” “small interfering RNA” or “siRNA” refer to an RNA molecule (or RNA analog) comprising between about 5-60 nucleotides (or nucleotide analogs) which is capable of directing or mediating RNAi. In certain embodiments, a siRNA molecule includes between about 15-30 nucleotides or nucleotide analogs, such as between about 16-25 nucleotides (or nucleotide analogs), between about 18-23 nucleotides (or nucleotide analogs), between about 19-22 nucleotides (or nucleotide analogs) (e.g., 19, 20, 21 or 22 nucleotides or nucleotide analogs), between about 19-25 nucleotides (or nucleotide analogs), and between about 19-24 nucleotides (or nucleotide analogs). The term “short” siRNA refers to a siRNA comprising 5-23 nucleotides, such as 21 nucleotides (or nucleotide analogs), for example, 19, 20, 21 or 22 nucleotides. The term “long” siRNA refers to a siRNA comprising 24-60 nucleotides, such as about 24-25 nucleotides, for example, 23, 24, 25 or 26 nucleotides. Short siRNAs may, in some instances, include fewer than 19 nucleotides, e.g., 16, 17 or 18 nucleotides, or as few as 5 nucleotides, provided that the shorter siRNA retains the ability to mediate RNAi. Likewise, long siRNAs may, in some instances, include more than 26 nucleotides, e.g., 27, 28, 29, 30, 35, 40, 45, 50, 55, or even 60 nucleotides, provided that the longer siRNA retains the ability to mediate RNAi or translational repression absent further processing, e.g., enzymatic processing, to a short siRNA. siRNAs can be single stranded RNA molecules (ss-siRNAs) or double stranded RNA molecules (ds-siRNAs) comprising a sense strand and an antisense strand which hybridized to form a duplex structure called siRNA duplex.

[0947] Subject: As used herein, the term “subject” or “patient” refers to any organism to which a composition in accordance with the disclosure may be administered, e.g., for experimental, diagnostic, prophylactic, and/or therapeutic purposes. Typical subjects include animals (e.g., mammals such as mice, rats, rabbits, non-human primates such as chimpanzees and other apes and monkey species, and humans) and/or plants.

[0948] Substantially Complementary: As used herein, the term “substantially complementary” means that the siRNA has a sequence (e.g., in the antisense strand) which is sufficient to bind the desired target mRNA, and to trigger the RNA silencing of the target mRNA.

[0949] Targeted Cells: As used herein, “targeted cells” refers to any one or more cells of interest. The cells may be found in vitro, in vivo, in situ or in the tissue or organ of an organism. The organism may be an animal, such as a mammal, a human, or a human patient.

[0950] Tauopathy: As used herein, tauopathies and/or tau-associated diseases, refers to a heterogeneous group of neurodegenerative diseases characterized by the dysfunction and/or aggregation of the microtubule-associated protein tau (MAPT). MAPT may also be referred to as “Tau” herein.

[0951] Therapeutic Agent: The term “therapeutic agent” refers to any agent that, when administered to a subject, has a therapeutic, diagnostic, and/or prophylactic effect and/or elicits a desired biological and/or pharmacological effect.

[0952] Therapeutically effective amount: As used herein, the term “therapeutically effective amount” means an amount of an agent to be delivered (e.g., nucleic acid, drug, therapeutic agent, diagnostic agent, prophylactic agent, etc.) that is sufficient, when administered to a subject suffering from or susceptible to an infection, disease, disorder, and/or condition, to treat, improve symptoms of, diagnose, prevent, and/or delay the onset of the infection, disease, disorder, and/or condition. In some embodiments, a therapeutically effective amount is provided in a single dose.

[0953] Treating: As used herein, the term “treating” refers to partially or completely alleviating, ameliorating, improving, relieving, delaying onset of, inhibiting progression of, reducing severity of, and/or reducing incidence of one or more symptoms or features of a particular infection, disease, disorder, and/or condition. For example, “treating” cancer may refer to inhibiting survival, growth, and/or spread of a tumor. Treatment may be administered to a subject who does not exhibit signs of a disease, disorder, and/or condition and/or to a subject who exhibits only early signs of a disease, disorder, and/or condition for the purpose of decreasing the risk of developing pathology associated with the disease, disorder, and/or condition.

[0954] Variant: As used herein, the term “variant” refers to a polypeptide or polynucleotide that has an amino acid or a nucleotide sequence that is substantially identical, e.g., having at least 70%, 75%, 80%, 85%, 90%, 95%, or 99% sequence identity to a reference sequence. In some embodiments, the variant is a functional variant.

[0955] Functional Variant: As used herein, the term “functional variant” refers to a polypeptide variant or a polynucleotide variant that has at least one activity of the reference sequence.

[0956] Vector: As used herein, the term “vector” refers to any molecule or moiety which transports, transduces, or otherwise acts as a carrier of a heterologous molecule. In some embodiments, vectors may be plasmids. Vectors of the present disclosure may be produced recombinantly. The heterologous molecule may be a polynucleotide and/or a polypeptide.

[0957] Viral Genome: As used herein, the term “viral genome” refers to the nucleic acid sequence(s) encapsulated in an AAV particle. A viral genome comprises a nucleic acid sequence with at least one payload region encoding a payload and at least one ITR.

[0958] The present disclosure is further illustrated by the following non-limiting examples.

### VI. EXAMPLES

### Example 1. Design and Synthesis of siRNA Sequences Targeting the Human MAPT Transcript

### Evaluation of MAPT Transcripts

[0959] siRNAs (19mers and 21mers) were generated from human microtubule associated protein tau (MAPT), transcript variant 4, NCBI RefSeq transcript sequence NM_016841.4 (SEQ ID NO: 3947). Subsequent analysis included: evaluation of full match (FM) 19mer and 17mer (without considering positions 1 and 19), and of 19mer and 17mer with single mismatch (SMM) for determination of cross-creativity with human (Hu), rhesus (Rh) and cynomolgus (Cyno) monkey, rat (Rt), and mouse (Ms) transcript (including miRNA seed); evaluation of predicted specificity in human, mouse, rat, and non-human primate (NHP), including separate analysis of sense and antisense strands; and, analysis of a human single nucleotide polymorphism (SNP) database (NCBI-DB-SNP) to identify siRNA targeting regions with known SNPs, including information of positions of SNPs within the target, as well as minor allele frequency (MAF) in available case data. A subset of siRNAs was selected for synthesis.

[0960] Cross-reactivity determination analysis was based on Human MAPT, transcript variant 4, NCBI RefSeq transcript sequence NM_016841.4 (SEQ ID NO: 3947). Analysis of siRNA cross-reactivity was performed for transcript variants and different species; for 19mers and 17mers with a full match (FM), and for 19mers and 17mers with a single mismatch (SMM).

[0961] An alignment was created by performing a BLASTn search with Human MAPT, transcript variant 4, NCBI RefSeq transcript sequence NM_016841.4 (SEQ ID NO: 3947) versus human, NHP (cynomolgus and rhesus), rat and mouse MAPT protein-coding transcript sequences. Table 9 provides information for MAPT transcript sequences corresponding to each species. Transcripts used for cross-reactivity determination analyses were limited to those longer than 5,000 bp. Sequences are identified in the Table 19 using NCBI RefSeq Accession and/or Ensembl ID identifier codes.

TABLE 19
MAPT transcripts

| | | 19mer cross-reactive | 19mer in | |
|---|---|---|---|---|
| Species | Transcript No. (Accession/ID) | with NM_016841.4 | common | Type |
| Hu | NM_001123066.3 | 5401 | 5120 | mRNA |
| Hu | NM_001123067.3 | 5448 | 5120 | mRNA |
| Hu | NM_001203251.1 | 5461 | 5120 | mRNA |
| Hu | NM_001203252.1 | 5460 | 5120 | mRNA |
| Hu | NM_005910.5 | 5447 | 5120 | mRNA |
| Hu | NM_016834.4 | 5463 | 5120 | mRNA |
| Hu | NM_016835.4 | 5418 | 5120 | mRNA |
| Hu | NM_016841.4 | 5476 | 5120 | mRNA |
| Hu | XM_005257362.4 | 5198 | 5120 | mRNA |
| Hu | XM_005257364.4 | 5119 | 5120 | mRNA |
| Hu | XM_005257365.4 | 5211 | 5120 | mRNA |
| Hu | XM_005257366.3 | 5256 | 5120 | mRNA |
| Hu | XM_005257367.4 | 5212 | 5120 | mRNA |
| Hu | XM_005257368.4 | 5225 | 5120 | mRNA |
| Hu | XM_005257369.4 | 5213 | 5120 | mRNA |
| Hu | XM_005257370.4 | 5278 | 5120 | mRNA |
| Hu | XM_005257371.4 | 5229 | 5120 | mRNA |
| Hu | ENST00000446361 | 5171 | 5120 | known PRT coding |
| Hu | ENST00000262410 | 5418 | 5120 | known PRT coding |
| Hu | ENST00000351559 | 5447 | 5120 | known PRT coding |
| Hu | ENST00000344290 | 5401 | 5120 | known PRT coding |
| Hu | ENST00000535772 | 5460 | 5120 | known PRT coding |
| Hu | ENST00000340799 | 5448 | 5120 | known PRT coding |
| Hu | ENST00000571311 | 289 | — | known PRT coding |
| Hu | ENST00000570299 | 856 | — | known PRT coding |
| Hu | ENST00000334239 | 1089 | — | known PRT coding |
| Hu | ENST00000420682 | 1013 | — | known PRT coding |
| Hu | ENST00000415613 | 966 | — | known PRT coding |
| Hu | ENST00000571987 | 983 | — | known PRT coding |
| Hu | ENST00000574436 | 1012 | — | known PRT coding |
| Hu | ENST00000431008 | 1025 | — | known PRT coding |
| Hu | ENST00000576518 | 1145 | — | known PRT coding |
| Hu | ENST00000572440 | 50 | — | known retained |
| Hu | ENST00000576238 | 0 | — | known retained |
| Hu | ENST00000577017 | 38 | — | known processed |
| Rh | XM_015119945.1 | 2184 | 2175 | mRNA |
| Rh | XM_015119946.1 | 2198 | 2175 | mRNA |
| Rh | XM_015119947.1 | 2193 | 2175 | mRNA |
| Rh | XM_015119948.1 | 2260 | 2175 | mRNA |
| Rh | XM_015119949.1 | 2207 | 2175 | mRNA |
| Rh | XM_015119950.1 | 2181 | 2175 | mRNA |
| Rh | XM_015119952.1 | 2185 | 2175 | mRNA |
| Rh | XM_015119953.1 | 2188 | 2175 | mRNA |
| Rh | XM_015119954.1 | 2286 | 2175 | mRNA |
| Rh | XM_015119955.1 | 2286 | 2175 | mRNA |
| Rh | XM_015119956.1 | 2299 | 2175 | mRNA |
| Rh | XM_015119957.1 | 2290 | 2175 | mRNA |
| Rh | XM_015119958.1 | 2299 | 2175 | mRNA |
| Rh | XM_015119959.1 | 2303 | 2175 | mRNA |
| Rh | XM_015119960.1 | 2166 | 2175 | mRNA |
| Rh | ENSMMUT00000068911 | 2184 | 2175 | novel PRT coding |
| Rh | ENSMMUT00000005862 | 2032 | 2175 | novel PRT coding |
| Rh | ENSMMUT00000005853 | 496 | — | known PRT coding |
| Rh | ENSMMUT00000001151 | 500 | — | known PRT coding |
| Rh | ENSMMUT00000005859 | 557 | — | known PRT coding |
| Rh | ENSMMUT00000005855 | 527 | — | known PRT coding |
| Cyno | NM_001123066.3* | 2105 | 2223 | mRNA |
| Cyno | NM_001123067.3* | 2148 | 2223 | mRNA |
| Cyno | NM_005910.5* | 2148 | 2223 | mRNA |
| Cyno | NM_016834.4* | 2152 | 2223 | mRNA |
| Cyno | NM_016835.4* | 2122 | 2223 | mRNA |
| Cyno | NM_016841.4* | 2165 | 2223 | mRNA |
| Cyno | XM_005584531.2 | 2178 | 2223 | mRNA |
| Cyno | XM_005584536.1 | 2227 | 2223 | mRNA |
| Cyno | XM_005584537.1 | 2244 | 2223 | mRNA |
| Cyno | XM_005584538.2 | 2178 | 2223 | mRNA |
| Cyno | XM_005584539.2 | 2182 | 2223 | mRNA |
| Cyno | XM_005584540.1 | 2270 | 2223 | mRNA |
| Cyno | XM_005584541.2 | 2270 | 2223 | mRNA |
| Cyno | XM_005584542.1 | 2283 | 2223 | mRNA |
| Cyno | XM_005584543.2 | 2274 | 2223 | mRNA |
| Cyno | XM_005584544.2 | 2283 | 2223 | mRNA |
| Cyno | XM_005584545.2 | 2287 | 2223 | mRNA |
| Cyno | XM_015437937.1 | 2195 | 2223 | mRNA |
| Cyno | XM_015437938.1 | 2191 | 2223 | mRNA |
| Cyno | XM_015437939.1 | 2208 | 2223 | mRNA |
| Cyno | XM_015437940.1 | 2189 | 2223 | mRNA |
| Cyno | XM_015437941.1 | 2206 | 2223 | mRNA |
| Cyno | XM_015437942.1 | 2219 | 2223 | mRNA |
| Cyno | XM_015437943.1 | 2193 | 2223 | mRNA |
| Rt | NM_017212.2 | 179 | 225 | mRNA |
| Rt | XM_008768268.2 | 177 | 225 | mRNA |
| Rt | XM_008768269.2 | 177 | 225 | mRNA |
| Rt | XM_008768270.2 | 179 | 225 | mRNA |
| Rt | XM_008768271.2 | 178 | 225 | mRNA |
| Rt | XM_008768272.2 | 177 | 225 | mRNA |
| Rt | XM_008768273.2 | 179 | 225 | mRNA |
| Rt | XM_008768277.2 | 176 | 225 | mRNA |
| Rt | XM_008768278.2 | 178 | 225 | mRNA |
| Rt | XM_008768279.2 | 178 | 225 | mRNA |
| Rt | XM_008768280.2 | 180 | 225 | mRNA |
| Rt | XM_008768281.2 | 181 | 225 | mRNA |
| Rt | XM_008768282.2 | 177 | 225 | mRNA |
| Rt | XM_017597175.1 | 176 | 225 | mRNA |
| Rt | ENSRNOT00000006947 | 179 | 225 | known PRT coding |
| Rt | ENSRNOT00000045127 | 71 | — | known PRT coding |
| Rt | ENSRNOT00000092428 | 0 | — | known PRT coding |
| Rt | ENSRNOT00000050070 | 66 | — | known PRT coding |
| Rt | ENSRNOT00000092483 | 5 | — | known processed |
| Rt | ENSRNOT00000042984 | 51 | — | known PRT coding |
| Ms | NM_001038609.2 | 213 | 218 | mRNA |
| Ms | NM_001285454.1 | 181 | 218 | mRNA |
| Ms | NM_001285455.1 | 213 | 218 | mRNA |
| Ms | NM_001285456.1 | 215 | 218 | mRNA |
| Ms | NM_010838.4 | 213 | 218 | mRNA |
| Ms | XM_006532407.3 | 213 | 218 | mRNA |
| Ms | XM_006532408.3 | 215 | 218 | mRNA |
| Ms | XM_006532409.2 | 215 | 218 | mRNA |
| Ms | XM_006532410.3 | 213 | 218 | mRNA |
| Ms | XM_017314315.1 | 207 | 218 | mRNA |
| Ms | ENSMUST00000106992 | 213 | 218 | known PRT coding |
| Ms | ENSMUST00000106988 | 69 | — | known PRT coding |
| Ms | ENSMUST00000106989 | 69 | — | known PRT coding |
| Ms | ENSMUST00000146353 | 0 | — | known PRT coding |
| Ms | ENSMUST00000145227 | 8 | — | known PRT coding |
| Ms | ENSMUST00000106993 | 100 | — | known PRT coding |
| Ms | ENSMUST00000100347 | 75 | — | known PRT coding |
| Ms | ENSMUST00000138384 | 8 | — | known PRT coding |
| Ms | ENSMUST00000144836 | 48 | — | known PRT coding |
| Ms | ENSMUST00000126820 | 46 | — | known PRT coding |
| Ms | ENSMUST00000132245 | 0 | — | known PRT coding |
| Ms | ENSMUST00000132977 | 0 | — | known PRT coding |

[0962] Without considering specificity prediction, 1891-3581 siRNAs were cross-reactive with human and NHP. For siRNAs predicted to be specific in human, 666-1382 siRNAs were cross-reactive with human and NHP. For siRNAs predicted to be specific in human and NHP, 517-1042 siRNAs were cross-reactive with human and NHP.

Evaluation of siRNA Candidates

[0963] siRNA off-target genes were predicted for human, rhesus monkey, cynomolgus monkey, mouse, rat, and dog. Off-target frequency was calculated as the number of predicted off-targets (genes) with 0, 1, 2, 3, or 4 mismatches relative to positions 2-18 of an siRNA, where 0 indicated no predicted off-target identified with the indicated number of mismatches. Criterion for off-target frequency was less than or equal to 20 (optimally less than or equal to 10) off-targets with 2 mismatches to the antisense strand. In general, the off-target frequency was used for refined ranking within siRNA candidate sets.

[0964] A specificity score was assigned to each siRNA strand. The specificity score accounted for the likelihood of unintended downregulation of any other transcript by full or partial complementarity of a siRNA strand (up to 4 mismatches within positions 2-18), and was based on the number and position of mismatches. Thus, the specificity score described the predicted most likely off-target(s) for all predicted off-targets corresponding to antisense and sense strands of each siRNA; where 0 indicated a perfect match. Criterion for the antisense and sense strand was a specificity score greater than or equal to 2 and greater than or equal to 1, respectively.

[0965] siRNA strands were analyzed for the presence of human, rhesus monkey, rat, mouse, rabbit, dog, and/or pig microRNA (miRNA) seed regions. siRNAs can function in a miRNA-like manner via base-pairing with complementary sequences within the 3′-UTR of mRNA molecules. The complementarity typically encompasses the 5′-bases 2-7 of the miRNA, which corresponds to the seed region. To circumvent siRNA action at functional miRNA binding sites, siRNA strands containing natural miRNA seed regions were excluded. Seed regions identified in miRNAs from human, rhesus monkey, dog, pig, mouse, and rat were classified as conserved. Mature miRNAs for Homo sapiens (2588), Macaca mulatta (914), Mus Musculus (1915), Rattus norvegicus (765), Canis familiaris (453), and Sus scrofa (411) were used for miRNA seed region conservation analyses. Oryctolagus cuniculus miRNAs were excluded as identified mature miRNAs (886) were not validated in depth.

[0966] Specificity categories were assigned to siRNAs (antisense [AS] and sense strand [SS], independently of each other) based on combined specificity score and miRNA seed analysis. For specificity category, lower numbers were selected, as 1 represented high specificity. Requisite specificity categories were AS1 or AS2, and SS1, SS2 or SS3

[0967] For assessment of SNPs, the total number of human MAPT SNPs described was 433. MAFs were assigned to 158 SNPs and 35 SNPs had a MAF greater than or equal to 1% in target sites (range, 0.0106-0.2025%).

[0968] Among the 19mers, 1891 human and NHP (cynomolgus) cross-reactive siRNAs were identified, of which 517 siRNAs were specific in human and NHP, and 19 siRNAs were highly specific in human. Among the 17mers, 2077 human and NHP cross-reactive siRNAs were identified, of which 564 siRNAs were specific in human and NHP, and 20 siRNAs were highly specific in human. The siRNAs were further filtered and sub-sorted by factors such as presence of human miRNA seeds, presence of rhesus monkey miRNA seeds, presence of conserved (human, mouse, rat) miRNA seeds, off-target frequency value, presence of SNPs with minor allele frequency (MAF) greater than or equal to 1% in target sites, and, predicted siRNA activity

siRNA Selection

[0969] Together, siRNAs were selected on the basis of several factors, including: cross-reactivity (with 19mer in human MAPT mRNA, and with 17mer/19mer in NHP MAPT mRNA); specificity category for human and NHP; miRNA seeds, which may not be identical to those of a known human miRNA, nor may it be conserved between human, mouse, and rat; off-target frequency (less than or equal to 15 human off-targets matched with 2 mismatches by antisense strand); and, human SNPs.

[0970] 191 siRNA duplexes predicted to be specific in human, monkey and mouse, including several siRNAs predicted to be active, were selected. The siRNA duplexes and their corresponding sense and antisense strand sequences are provided in Table 4, where the antisense and sense strand sequence comprise dTdT overhangs at the 3′ end of each sequence; and in Table 5 where the sense and antisense strand sequences do not comprise a dTdT overhang. The target sites of these siRNAs were distributed along the human MAPT transcript. Position 1 of the antisense strand was engineered to a U and position 19 of the sense strand was engineered to a C, in order to unpair the duplex at this position.

### Example 2. Initial In Vitro siRNA Screening and Hit Identification

[0971] The MAPT siRNA duplexes designed in Example 1 and provided in Table 4 and 5, were screened for inhibition of tau (MAPT) expression (e.g., mRNA inhibition) in HEK293 cells at a duple concentration of either 0.1 nM or 10 nM. The 191 siRNA duplexes were designed to target the coding region of MAPT or the 3′ UTR region.

[0972] The percent MAPT mRNA remaining relative to control in the HEK293 cells post-treatment with the 191 siRNA duplexes at the 0.1 nM and 10 nM concentrations is provided in Table 20. As shown in Table 20, approximately 20 siRNA sequences reduced tau mRNA levels by approximately 60% at the 0.1 nM concentration and 80% at the 10 nM concentration. The siRNA duplexes of D-001 (SEQ ID NO: 4143 and 3952 or 4477 and 4687), D-002 (SEQ ID NO: 4144 and 3953 or 4478 and 4688), D-003 (SEQ ID NO: 4145 and 3954 or 4479 and 4689, D-004 (SEQ ID NO: 4146 and 3955 or 4480 and 4690), D-009 (SEQ ID NO: 4151 and 3956 or 4485 and 4691), D-014 (SEQ ID NO: 4156 and 3957 or 4490 and 4692), D-015 (SEQ ID NO: 4157 and 3958 or 4491 and 4693), D-016 (SEQ ID NO: 4158 and 3959 or 4492 and 4694), D-017 (SEQ ID NO: 4159 and 3960 or 4493 and 4695), D-018 (SEQ ID NO: 4160 and 3961 or 4494 and 4696), D-019 (SEQ ID NO: 4161 and 3692 or 4495 and 4697), D-026 (SEQ ID NO: 4168 and 3965 or 4502 and 4700), D-030 (SEQ ID NO: 4172 and 3966 or 4506 and 4701), D-035 (SEQ ID NO: 4177 and 3967 or 4511 and 4702), D-038 (SEQ ID NO: 4180 and 3970 or 4514 and 4705), D-043 (SEQ ID NO: 4185 and 3975 or 4519 and 4710), D-045 (SEQ ID NO: 4187 and 3977 or 4521 and 4712), D-047 (SEQ ID NO: 4189 and 3979 or 4523 and 4714), D-049 (SEQ ID NO: 4191 and 3981 or 4525 and 4716), and D-051 (SEQ ID NO: 4193 and 3983 or 4527 and 4718) resulted in the greatest knockdown of MAPT mRNA (Table 20). The sequences of having the indicated duplex IDs in Table 20 are provided in Table 4. Table 5 includes the corresponding siRNA sequences without the dTdT overhangs.

TABLE 20
Percentage of tau mRNA remaining following transfection of siRNA duplexes

| siRNA | % tau mRNA | % tau mRNA | siRNA | % tau mRNA | % tau mRNA |
|---|---|---|---|---|---|
| Duplex | remaining relative | remaining relative | Duplex | remaining relative | remaining relative |
| ID | to control, 0.1 nM | to control, 10 nM | ID | to control, 0.1 nM | to control, 10 nM |
| D-002 | 26 | 15 | D-071 | 64 | 60 |
| D-019 | 30 | 15 | D-107 | 64 | 60 |
| D-026 | 30 | 15 | D-120 | 64 | 60 |
| D-003 | 30 | 15 | D-208 | 64 | 60 |
| D-017 | 30 | 15 | D-161 | 64 | 60 |
| D-014 | 32 | 16 | D-066 | 64 | 61 |
| D-043 | 33 | 17 | D-143 | 65 | 61 |
| D-004 | 33 | 17 | D-065 | 65 | 61 |
| D-015 | 34 | 17 | D-091 | 65 | 62 |
| D-016 | 34 | 17 | D-101 | 65 | 62 |
| D-030 | 35 | 18 | D-210 | 66 | 62 |
| D-009 | 35 | 18 | D-112 | 66 | 63 |
| D-001 | 35 | 18 | D-138 | 66 | 63 |
| D-045 | 36 | 19 | D-094 | 66 | 63 |
| D-047 | 36 | 19 | D-149 | 66 | 64 |
| D-038 | 36 | 19 | D-083 | 66 | 64 |
| D-051 | 36 | 20 | D-102 | 66 | 64 |
| D-018 | 36 | 20 | D-067 | 66 | 64 |
| D-035 | 38 | 20 | D-132 | 66 | 64 |
| D-049 | 38 | 21 | D-172 | 66 | 65 |
| D-056 | 40 | 21 | D-164 | 67 | 65 |
| D-096 | 40 | 22 | D-139 | 67 | 65 |
| D-069 | 40 | 22 | D-198 | 67 | 65 |
| D-024 | 41 | 23 | D-113 | 67 | 66 |
| D-039 | 41 | 23 | D-140 | 67 | 66 |
| D-040 | 42 | 23 | D-133 | 67 | 66 |
| D-044 | 42 | 23 | D-158 | 67 | 66 |
| D-122 | 43 | 23 | D-068 | 68 | 67 |
| D-085 | 43 | 24 | D-144 | 68 | 67 |
| D-053 | 44 | 25 | D-146 | 69 | 67 |
| D-052 | 44 | 25 | D-199 | 69 | 68 |
| D-041 | 45 | 25 | D-177 | 69 | 68 |
| D-050 | 45 | 26 | D-165 | 70 | 69 |
| D-114 | 46 | 27 | D-180 | 70 | 69 |
| D-042 | 46 | 27 | D-196 | 70 | 69 |
| D-036 | 47 | 27 | D-075 | 70 | 70 |
| D-126 | 48 | 28 | D-203 | 70 | 71 |
| D-048 | 51 | 28 | D-108 | 71 | 71 |
| D-055 | 51 | 28 | D-159 | 71 | 71 |
| D-025 | 52 | 28 | D-191 | 71 | 73 |
| D-097 | 52 | 28 | D-193 | 71 | 73 |
| D-037 | 53 | 29 | D-154 | 71 | 74 |
| D-076 | 53 | 29 | D-088 | 72 | 74 |
| D-104 | 53 | 30 | D-109 | 72 | 74 |
| D-057 | 54 | 33 | D-197 | 72 | 74 |
| D-086 | 54 | 34 | D-202 | 73 | 74 |
| D-061 | 54 | 34 | D-092 | 73 | 75 |
| D-127 | 54 | 34 | D-121 | 74 | 75 |
| D-115 | 54 | 35 | D-173 | 74 | 75 |
| D-046 | 55 | 36 | D-150 | 74 | 75 |
| D-116 | 55 | 38 | D-194 | 74 | 76 |
| D-098 | 55 | 38 | D-155 | 74 | 76 |
| D-054 | 56 | 40 | D-178 | 75 | 76 |
| D-077 | 56 | 41 | D-124 | 75 | 78 |
| D-059 | 56 | 42 | D-186 | 75 | 78 |
| D-128 | 56 | 42 | D-151 | 75 | 78 |
| D-078 | 57 | 42 | D-134 | 75 | 78 |
| D-117 | 57 | 43 | D-166 | 75 | 78 |
| D-099 | 57 | 43 | D-181 | 75 | 79 |
| D-062 | 57 | 44 | D-152 | 75 | 79 |
| D-079 | 57 | 44 | D-141 | 75 | 79 |
| D-168 | 57 | 45 | D-084 | 76 | 79 |
| D-072 | 57 | 45 | D-182 | 76 | 81 |
| D-058 | 57 | 46 | D-183 | 76 | 81 |
| D-070 | 57 | 46 | D-187 | 77 | 82 |
| D-080 | 58 | 46 | D-162 | 77 | 83 |
| D-093 | 58 | 47 | D-142 | 77 | 83 |
| D-060 | 58 | 47 | D-188 | 77 | 84 |
| D-105 | 58 | 48 | D-200 | 77 | 84 |
| D-169 | 59 | 49 | D-095 | 78 | 85 |
| D-129 | 59 | 49 | D-204 | 81 | 85 |
| D-153 | 59 | 50 | D-179 | 81 | 85 |
| D-130 | 59 | 51 | D-103 | 81 | 85 |
| D-110 | 60 | 51 | D-209 | 83 | 85 |
| D-087 | 60 | 51 | D-205 | 84 | 85 |
| D-064 | 60 | 52 | D-201 | 85 | 86 |
| D-100 | 61 | 52 | D-184 | 85 | 88 |
| D-118 | 61 | 52 | D-192 | 86 | 90 |
| D-163 | 61 | 52 | D-135 | 87 | 90 |
| D-081 | 61 | 53 | D-125 | 87 | 90 |
| D-073 | 61 | 53 | D-195 | 88 | 91 |
| D-082 | 61 | 53 | D-189 | 88 | 92 |
| D-145 | 61 | 53 | D-156 | 89 | 92 |
| D-111 | 61 | 54 | D-174 | 90 | 93 |
| D-170 | 62 | 55 | D-190 | 91 | 94 |
| D-089 | 62 | 56 | D-160 | 91 | 94 |
| D-123 | 62 | 56 | D-063 | 92 | 96 |
| D-148 | 62 | 56 | D-207 | 93 | 96 |
| D-119 | 62 | 56 | D-147 | 93 | 97 |
| D-106 | 62 | 56 | D-185 | 97 | 97 |
| D-136 | 63 | 57 | D-157 | 97 | 101 |
| D-137 | 63 | 58 | D-206 | 98 | 101 |
| D-090 | 63 | 59 | D-175 | 100 | 104 |
| D-131 | 63 | 59 | D-167 | 106 | 112 |
| D-074 | 64 | 59 | D-176 | 111 | 124 |
| D-171 | 64 | 59 | | | |

[0973] Of the siRNAs designed and provided in Table 4 and tested as shown in Table 20, 10 siRNAs were selected for further evaluation in vitro, which included D-001 (SEQ ID NO: 4143 and 3952 or 4477 and 4687), D-004 (SEQ ID NO: 4146 and 3955 or 4480 and 4690), D-009 (SEQ ID NO: 4151 and 3956 or 4485 and 4691), D-016 (SEQ ID NO: 4158 and 3959 or 4492 and 4694), D-018 (SEQ ID NO: 4160 and 3961 or 4494 and 4696), D-019 (SEQ ID NO: 4161 and 3692 or 4495 and 4697), D-026 (SEQ ID NO: 4168 and 3965 or 4502 and 4700), D-030 (SEQ ID NO: 4172 and 3966 or 4506 and 4701), D-045 (SEQ ID NO: 4187 and 3977 or 4521 and 4712), D-051 (SEQ ID NO: 4193 and 3983 or 4527 and 4718). The IC50 values and maximum inhibition in five different cells lines were determined for each of these 10 siRNAs (Table 25). The five cell lines used were MCF-7 cells (breast cancer cells), HEK293 cells (epithelial like cells from the kidneys), BT-474 cells (cells that exhibit epithelial morphology that was isolated from a solid, invasive ductal carcinoma of the breast cancer), LNCap cells (androgen-sensitive human prostate adenocarcinoma cells derived from the left supraclavicular lymph node metastasis), and SH-SY5Y cells (cloned neuroblastoma cell line). High potency was observed in the BT-474 cells, with IC50 values in the 7-21 μM range and maximum inhibition values between 80-90% (Table 25). Similar data was observed in the HEK293 and LNCap cell lines (Table 25).

TABLE 25
IC50 and Maximum Inhibition of MAPT targeting siRNAs in HEK293 cells,
BT-474 cells, LNCap cells, SH-SY5Y cells, and MCF-7 cells

| | HEK293 Cells | | BT-474 Cells | | LNCap Cells | | MCF-7 Cells | |
|---|---|---|---|---|---|---|---|---|
| | IC50 | Maximum | IC50 | Maximum | IC50 | Maximum | IC50 | Maximum |
| Duplex | (nM) | Inhibition | (nM) | Inhibition | (nM) | Inhibition | (nM) | Inhibition |
| D-026 | 0.026 | 81.7 | 0.011 | 90.7 | 0.005 | 86.3 | 0.063 | 68.6 |
| D-019 | 0.098 | 76.1 | 0.007 | 86.5 | 0.010 | 81.3 | 0.058 | 65.8 |
| D-004 | 0.109 | 80.1 | 0.062 | 86.1 | 0.024 | 84.7 | 1.822 | 58.7 |
| D-016 | 0.023 | 76.2 | 0.035 | 88.0 | 0.016 | 84.8 | 1.072 | 65.6 |
| D-009 | 0.020 | 84.9 | 0.010 | 90.8 | 0.011 | 86.5 | 0.574 | 65.4 |
| D-030 | 0.078 | 74.8 | 0.115 | 83.8 | 0.082 | 80.5 | 124.980 | 51.7 |
| D-001 | 0.038 | 81.8 | 0.021 | 90.7 | 0.010 | 87.4 | 5.528 | 56.2 |
| D-045 | 0.064 | 76.7 | 0.019 | 86.6 | 0.030 | 83.4 | 13.662 | 56.1 |
| D-018 | 0.056 | 81.8 | 0.028 | 85.2 | 0.039 | 84.2 | 0.248 | 61.4 |
| D-051 | 0.144 | 77.7 | 0.040 | 83.7 | 0.025 | 83.6 | 2.676 | 56.8 |

### Example 3. Design and Evaluation of Vectorized miRNAs

[0974] Ten of the MAPT siRNA sequences demonstrating high potency (e.g., increased knockdown of MAPT mRNA) based on strong cross-cell activity and diversity as shown in Example 2 and Table 25, were selected for design of miRNA constructs comprising a passenger strand (sense) and a guide strand (antisense) as well as a scaffold comprising a 5′ flanking region, loop region, and a 3′ flanking region. The scaffolds used in these constructs included: (i) a 5′ flanking region of SEQ ID NO: 4354 (DNA) or 4879 (RNA), a loop region of SEQ ID NO: 4362 (DNA) or 4887 (RNA), and a 3′ flanking region of SEQ ID NO: 4373 (DNA) or 4898 (RNA); (ii) a 5′ flanking region of SEQ ID NO: 4354 (DNA) or 4879 (RNA), a loop region of SEQ ID NO: 4363 (DNA) or 4888 (RNA), and a 3′ flanking region of SEQ ID NO: 4373 (DNA) or 4898 (RNA); (iii) a 5′ flanking region of SEQ ID NO: 4354 (DNA) or 4879 (RNA), a loop region of SEQ ID NO: 4362 (DNA) or 4887 (RNA), and a 3′ flanking region of SEQ ID NO: 4374 (DNA) or 4899 (RNA); or (iv) a 5′ flanking region of SEQ ID NO: 4355 (DNA) or 4880 (RNA), a loop region of SEQ ID NO: 4366 (DNA) or 4891 (RNA), and a 3′ flanking region of SEQ ID NO: 4375 (DNA) or 4900 (RNA). The miRNA constructs also referred to herein as modulatory polynucleotides were designed and generated to have the scaffolds, passenger strand, and guide strand as indicated in Tables 9A and 9B above. From 5′ to 3′, these modulatory polynucleotides comprised the indicated 5′ flanking region, the indicated passenger strand, the indicated loop region, the indicated guide strand, and the indicated 3′ flanking region (Table 9A and 9B).

[0975] The modulatory polynucleotides VOYTaumiR-127-530 (SEQ ID NO: 4405), VOYTaumiR-127-556 (SEQ ID NO: 4406), VOYTaumiR-127-564 (SEQ ID NO: 4407), VOYTaumiR-127-579 (SEQ ID NO: 4408), and VOYTaumiR-127-586 (SEQ ID NO: 4409) were tested to determine guide and passenger strand activity using the DUAL-GLOR luciferase assay (Promega) in HEK293 cells. These constructs were vectorized in a self-complementary AAV genome under the control of a CBA promoter and transfected into cells with reporter plasmids that comprised the target regions of the guide and passenger strands being investigated arranged in tandem. Approximately 48-hours post transfection, cells were lysed and the Renilla and firefly luciferase activity was measured and relative activity was obtained by normalizing the Renilla luciferase level to the control firefly luciferase level (relative R/F luc activity % over amiR-NTC). A higher luciferase signal indicates low activity and a low luciferase signal indicates increased knockdown and activity. Of the constructs tested with respect to the guide strand, less than 50% normalized R/F luciferase activity was observed for the guide strands tested, with the guide strand of VOYTaumiR-127-530 showing the greatest knockdown and activity. The guide strands of VOYTaumiR-127-556 (SEQ ID NO: 4406), VOYTaumiR-127-564 (SEQ ID NO: 4407), VOYTaumiR-127-579 (SEQ ID NO: 4408), and VOYTaumiR-127-586 (SEQ ID NO: 4409) also all showed high, comparable levels of knockdown and activity. With respect to the passenger strand activity, VOYTaumiR-127-530 (SEQ ID NO: 4405), VOYTaumiR-127-564 (SEQ ID NO: 4407), VOYTaumiR-127-579 (SEQ ID NO: 4408), and VOYTaumiR-127-586 (SEQ ID NO: 4409), all showed low levels of passenger strand activity as indicated by a high normalized R/F luciferase activity. The ability of these modulatory polynucleotides to knockdown MAPT mRNA expression was also investigated. The percentage of MAPT mRNA remaining was quantified by qPCR and normalized to the TBP gene. VOYTaumiR-127-530 (SEQ ID NO: 4405) demonstrated a 92.3% knockdown (7.7% MAPT mRNA remaining), VOYTaumiR-127-556 (SEQ ID NO: 4406) demonstrated a 66% knockdown (34% MAPT mRNA remaining), VOYTaumiR-127-564 (SEQ ID NO: 4407) demonstrated a 90.4% knockdown (9.6% MAPT mRNA remaining), VOYTaumiR-127-579 (SEQ ID NO: 4408) demonstrated an 86.5% knockdown (13.5% MAPT mRNA remaining), and VOYTaumiR-127-586 (SEQ ID NO: 4409) demonstrated a 76.3% knockdown (23.7% MAPT mRNA remaining) of MAPT mRNA. The mRNA knockdown results correlated with the results observed in the guide/passenger strand activity assay.

[0976] The modulatory polynucleotides VOYTaumiR-102-530 (SEQ ID NO: 4380), VOYTaumiR-102-556 (SEQ ID NO: 4381), VOYTaumiR-102-579 (SEQ ID NO: 4383), VOYTaumiR-102-586 (SEQ ID NO: 4384), VOYTaumiR-104-530 (SEQ ID NO: 4385), VOYTaumiR-104-556 (SEQ ID NO: 4386), VOYTaumiR-104-579 (SEQ ID NO: 4388), VOYTaumiR-104-586 (SEQ ID NO: 4389), VOYTaumiR-109-530 (SEQ ID NO: 4390), VOYTaumiR-109-556 (SEQ ID NO: 4391), VOYTaumiR-109-579 (SEQ ID NO: 4393), VOYTaumiR-109-586 (SEQ ID NO: 4394), VOYTaumiR-114-530 (SEQ ID NO: 4395), VOYTaumiR-114-556 (SEQ ID NO: 4396), VOYTaumiR-114-579 (SEQ ID NO: 4398), VOYTaumiR-114-586 (SEQ ID NO: 4399), VOYTaumiR-116-530 (SEQ ID NO: 4400), VOYTaumiR-116-556 (SEQ ID NO: 4401), VOYTaumiR-116-579 (SEQ ID NO: 4403), VOYTaumiR-116-586 (SEQ ID NO: 4404), VOYTaumiR-127-530 (SEQ ID NO: 4405), VOYTaumiR-127-556 (SEQ ID NO: 4406), VOYTaumiR-127-579 (SEQ ID NO: 4408), and VOYTaumiR-127-586 (SEQ ID NO: 4409) were also tested to determine guide strand activity using the DUAL-GLOR luciferase assay (Promega) in HEK293 cells, as compared to a non-targeting control (NTC) construct. These constructs were vectorized and transfected into cells with reporter plasmids that comprised the target regions of the guide strand being investigated arranged in tandem. Approximately 48-hours post transfection, cells were lysed and the Renilla and firefly luciferase activity was measured and relative activity was obtained by normalizing the Renilla luciferase level to the non-targeting control firefly luciferase level (relative R/F luc activity % over NTC). A higher luciferase signal indicates low activity and a low luciferase signal indicates increased knockdown and activity. As shown in FIG. 1, greater than 75% knockdown was observed for all the guide strands of the vectorized modulatory polynucleotides targeting MAPT tested and no knockdown was observed for the non-targeting control construct.

[0977] Vectorized modulatory polynucleotides VOYTaumiR-102-530 (SEQ ID NO: 4380), VOYTaumiR-102-556 (SEQ ID NO: 4381), VOYTaumiR-102-579 (SEQ ID NO: 4383), VOYTaumiR-102-586 (SEQ ID NO: 4384), VOYTaumiR-104-530 (SEQ ID NO: 4385), VOYTaumiR-104-556 (SEQ ID NO: 4386), VOYTaumiR-104-579 (SEQ ID NO: 4388), VOYTaumiR-104-586 (SEQ ID NO: 4389), VOYTaumiR-109-530 (SEQ ID NO: 4390), VOYTaumiR-109-556 (SEQ ID NO: 4391), VOYTaumiR-109-579 (SEQ ID NO: 4393), VOYTaumiR-109-586 (SEQ ID NO: 4394), VOYTaumiR-114-530 (SEQ ID NO: 4395), VOYTaumiR-114-556 (SEQ ID NO: 4396), VOYTaumiR-114-579 (SEQ ID NO: 4398), VOYTaumiR-114-586 (SEQ ID NO: 4399), VOYTaumiR-116-530 (SEQ ID NO: 4400), VOYTaumiR-116-556 (SEQ ID NO: 4401), VOYTaumiR-116-579 (SEQ ID NO: 4403), VOYTaumiR-116-586 (SEQ ID NO: 4404), VOYTaumiR-127-530 (SEQ ID NO: 4405), VOYTaumiR-127-556 (SEQ ID NO: 4406), VOYTaumiR-127-579 (SEQ ID NO: 4408), and VOYTaumiR-127-586 (SEQ ID NO: 4409) or a vectorized non-target control were also transfected into HEK293 cells at 1 μg/well to measure knockdown of MAPT mRNA by qPCR at 48 hours post-transfection. The amount of MAPT mRNA remaining was determined and the fold-change in MAPT mRNA remaining for each vectorized modulatory polynucleotide relative to the non-target control (NTC) was calculated as shown on the Y-axis of FIG. 2. A number of modulatory polynucleotides tested lead to a fold change of at least 0.5 in MAPT mRNA remaining relative to the non-target control, including VOYTaumiR-127-530 (SEQ ID NO: 4405), VOYTaumiR-127-556 (SEQ ID NO: 4406), VOYTaumiR-109-556 (SEQ ID NO: 4391), and VOYTaumiR-109-579 (SEQ ID NO: 4393) (FIG. 2). Several modulatory polynucleotides led to a fold change of at least 0.7 in MAPT mRNA remaining relative to the non-target control, including VOYTaumiR-127-579 (SEQ ID NO: 4408), VOYTaumiR-127-586 (SEQ ID NO: 4409), VOYTaumiR-116-556 (SEQ ID NO: 4401), VOYTaumiR-109-530 (SEQ ID NO: 4390), VOYTaumiR-109-586 (SEQ ID NO: 4394), VOYTaumiR-104-556 (SEQ ID NO: 4386), and VOYTaumiR-104-586 (SEQ ID NO: 4389) (FIG. 2).

[0978] Several of the modulatory polynucleotides that demonstrated a fold change of at least 0.5-0.7 in MAPT mRNA remaining relative to the non-target control as shown in FIG. 2 were selected for subsequent testing in a dose-response study, including VOYTaumiR-127-530 (SEQ ID NO: 4405), VOYTaumiR-127-556 (SEQ ID NO: 4406), VOYTaumiR-127-579 (SEQ ID NO: 4408), VOYTaumiR-127-586 (SEQ ID NO: 4409), VOYTaumiR-109-530 (SEQ ID NO: 4390), VOYTaumiR-109-556 (SEQ ID NO: 4391), VOYTaumiR-109-579 (SEQ ID NO: 4393), VOYTaumiR-109-586 (SEQ ID NO: 4394), VOYTaumiR-116-579 (SEQ ID NO: 4403), VOYTaumiR-104-556 (SEQ ID NO: 4386), and VOYTaumiR-104-586 (SEQ ID NO: 4389). These modulatory polynucleotides or a non-target control construct were transfected into HEK293 cells at a concentration of 0.05 μg per well, 0.16 μg per well, 0.5 μg per well, or 1.5 μg per well. Cells were harvested at 48 hours post-transfection, and the MAPT mRNA levels remaining were determined. The fold change in MAPT mRNA levels remaining post-transfection with the vectorized modulatory polynucleotides relative to the non-targeting control (NTC) was calculated (FIG. 3). As provided in FIG. 3, a strong dose response in MAPT mRNA inhibition was observed for at least VOYTaumiR-127-530 (SEQ ID NO: 4405), VOYTaumiR-127-586 (SEQ ID NO: 4409), VOYTaumiR-109-530 (SEQ ID NO: 4390), VOYTaumiR-109-556 (SEQ ID NO: 4391), VOYTaumiR-109-579 (SEQ ID NO: 4393), and VOYTaumiR-109-586 (SEQ ID NO: 4394).

[0979] The ability of additional modulatory polynucleotides to inhibit MAPT mRNA was investigated in HEK293 cells, including VOYTaumiR-102-582 (SEQ ID NO: 5027), VOYTaumiR-104-582 (SEQ ID NO: 5031), VOYTaumiR-109-582 (SEQ ID NO: 5035), VOYTaumiR-114-582 (SEQ ID NO: 5039), VOYTaumiR-127-582 (SEQ ID NO: 5047), VOYTaumiR-102-587 (SEQ ID NO: 5028), VOYTaumiR-109-587 (SEQ ID NO: 5036), VOYTaumiR-114-587 (SEQ ID NO: 5040), VOYTaumiR-104-552 (SEQ ID NO: 5033), VOYTaumiR-104-549 (SEQ ID NO: 5034), and VOYTaumiR-116-549 (SEQ ID NO: 5046). These constructs were vectorized and transfected into cells at a concentration of 0.50 μg per well or 1 μg per well. VOYTaumiR-127-530 (SEQ ID NO: 4405), VOYTaumiR-109-530 (SEQ ID NO: 4390), and an antisense oligonucleotide (ASO) targeting MAPT were included as positive controls, and a plasmid encoding GFP or a non-targeting control (NTC) were included as negative controls (FIG. 4). Cells were harvested at 48 hours post-transfection, and the MAPT mRNA levels remaining were determined. The fold change in MAPT mRNA levels remaining post-transfection with the vectorized modulatory polynucleotides relative to the non-targeting control was also calculated (FIG. 4). As shown in FIG. 4, the eleven vectorized modulatory polynucleotides targeting MAPT (VOYTaumiR-102-582, VOYTaumiR-104-582, VOYTaumiR-109-582, VOYTaumiR-114-582, VOYTaumiR-127-582, VOYTaumiR-102-587, VOYTaumiR-109-587, VOYTaumiR-114-587, VOYTaumiR-104-552, VOYTaumiR-104-549, and VOYTaumiR-116-549) transfected at 1.0 μg per well, resulted in approximately a 50% knockdown of MAPT mRNA. Even when transfected at 0.5 μg per well, seven of the vectorized modulatory polynucleotides (VOYTaumiR-102-582, VOYTaumiR-104-582, VOYTaumiR-109-582, VOYTaumiR-114-582, VOYTaumiR-127-582, VOYTaumiR-104-552, VOYTaumiR-104-549, and VOYTaumiR-116-549) tested resulted in approximately 40-50% knockdown of MAPT mRNA.

[0980] Taken together, these data demonstrate several modulatory polynucleotides for targeting MAPT that demonstrated high knockdown of MAPT mRNA, high guide strand activity, and/or low passenger strand activity that could be used to treat tauopathies, e.g. tauopathies with aberrant expression of MAPT.

### Example 4. Viral Genomes Encoding siRNA Molecules

[0981] Modulatory polynucleotides comprising a molecular scaffold and encoding siRNA duplexes (siRNA molecules) comprising guide (antisense) strands targeting the MAPT transcript and passenger (sense) strands, were engineered into single stranded or self-complementary AAV viral genomes.

[0982] The single stranded AAV viral genomes in 5′ to 3′ order, comprised a 5′ inverted terminal repeat (ITR) comprising SEQ ID NO: 4469, a CMVie enhancer comprising SEQ ID NO: 4472, a CBA promoter comprising SEQ ID NO: 5199, an hBG intron comprising SEQ ID NO: 4475, a modulatory polynucleotide comprising any one of SEQ ID NOs: 4380-4409, a human growth hormone (hGH) polyadenylation (PolyA) signal sequence comprising SEQ ID NO: 4476, and a 3′ ITR comprising SEQ ID NO: 4470. The single stranded viral genomes comprise the nucleotide sequences of any one of SEQ ID NOs: 4439-4468 and are provided in Table 10A and Tables 11-18.

[0983] The self-complementary AAV viral genomes, in 5′ to 3′ order, comprised a 5′ inverted terminal repeat (ITR) comprising SEQ ID NO: 5197, a CMVie enhancer comprising SEQ ID NO: 4171, a CBA promoter comprising SEQ ID NO: 5199, an hBG intron comprising SEQ ID NO: 4475, a modulatory polynucleotide comprising any one of SEQ ID NOs: 4380-4409 or 5027-5050, a human growth hormone (hGH) polyadenylation (PolyA) signal sequence comprising SEQ ID NO: 4476, and a 3′ ITR comprising SEQ ID NO: 5200. The self-complementary viral genomes comprise the nucleotide sequences of any one of SEQ ID NOs: 5149-5196 and are provided in Table 10A, Table 10B, and Table 26.

### Example 5. Tau Knock-Down in In Vivo Animal Studies

### In Vivo Rodent Studies

[0984] To evaluate in vivo biological activity of AAV particles comprising vector genomes that encode MAPT siRNA, select AAV particles are delivered to rodents, such as transgenic mice (e.g., htau, P301S, rTg4510, rTgTauEC, SCN1a-A1783V) and non-transgenic (wild type) mice, via ICM, IM, IP, ICV, IPa (e.g., intrathalamic) or IT administration routes at a number of doses within a set dose range. A control group is treated with, e.g., vehicle, which can be PBS. The administration may include one or more injections over a period of time. Following test article administration, behavioral tests that may include the Morris water-, Y-, T- or radial arm-maze, or object recognition or open field tests, are performed at several time intervals across the lifespan. At a predetermined day post-dosing, animals are euthanized, and brain tissue punches (e.g., sampled from frontal and temporal lobes, basal ganglia, cerebellum, parietal lobe and brainstem) are collected and snap frozen. Tissue punches are homogenized, and the total RNA is purified. Relative MAPT expression (mRNA) is determined by quantification methods, e.g. qRT-PCR. MAPT expression is normalized to housekeeping gene expression, and then further normalized to the vehicle control group. Tissue samples, including brain and spinal cord, in addition to other peripheral organs, are also used to quantify tau protein, e.g., using immunohistochemical and western blot approaches.

### In Vivo Htau Mouse Studies

[0985] The htau mouse model of tauopathy, the natural history of which has been previously described in detail by Andorfer et al., 2003 (Andorfer et al., J Neurochem. 2003 August; 86(3):582-90, the contents of which are incorporated herein by reference in their entirety), is identified for studies, such as but not limited to, pharmacology and efficacy studies, due to both favorable cognitive and behavioral phenotypes.

[0986] The htau mouse transgene contains the coding sequence, intronic regions, and regulatory elements of the human microtubule-associated protein tau (MAPT) gene. Although no endogenous mouse MAPT is detected (the htau mouse was generated on a mouse tau knockout background), all six isoforms (including both 3R and 4R forms) of human MAPT are expressed. Htau mice develop tau pathology in a time course and distribution that is comparable to that occurring in the early stages of human Alzheimer's disease (AD). Hyperphosphorylated MAPT is detected in cell bodies and dendrites by 3 months of age. Accumulation of hyperphosphorylated tau begins by 6 months, but increases further by 13- and 15-months of age. Aggregated tau and PHFs are detectable in htau mice aged 9 months via sarkosyl-insolubility. The majority of tau pathology in htau mice is found in neocortex and hippocampus, while minimal tau pathology is found in brain stem and spinal cord. Consequently, there are no overt gross motor or behavioral disturbances. Tau pre-tangle, such as CP13 (pSer²⁰²) immunoreactivity can be observed in CA1 and CA3 at 4 months of age. At 12 months of age, htau mice display prominent hippocampal CP13 and PHF-1 (pSer³⁹⁶/pSer⁴⁰⁴; described in International Publication WO199620218, the contents of which are herein incorporated in their entirety) immunoreactivity, resembling that observed in human AD at a moderate stage of tau pathology. Htau mice also develop learning and memory deficits in an age-dependent manner. For instance, object recognition memory and spatial memory are impaired in the aged htau mice (12 months of age). These deficits have not been observed in younger (4-month) htau mice.

### Paired Helical Filament (PHF) Seeding

[0987] To circumvent an extended drug screening timeline resulting from prolonged disease progression in htau mice, which do not exhibit cognitive deficits until an advanced age (12 months old), sarkosyl insoluble paired helical filament (PHF) tau from Alzheimer's disease (AD) or other tauopathy disease brain or biofluid, is injected into the hippocampus of htau mice (n=10-15 mice), using methods similar to those previously described (see e.g., Hu et al., Alzheimer's Dement. 2016 October; 12(10):1066-1077 and Gerson et al., J Neurotrauma. 2016 Nov. 15; 33(22):2034-2043, the contents of each of which are incorporated herein by reference in their entirety).

[0988] The amount of PHF for injection and the time course (4, 8, and 12 weeks) for the development of seeding activity, in other words, the initiation of tau pathology, as well as for the development of cognitive deficits, such as those that may be measured by spatial memory (e.g., Morris water maze) and/or novel object recognition tests, is determined.

[0989] Age-matched htau and wild type (control) mice may be used. Aged htau mice (12 months old; n=10-15) are monitored for the onset of cognitive deficits as previously described by Polydoro et al., 2009 and Geiszler et al., 2016 (Polydoro et al., J Neurosci. 2009 Aug. 26; 29(34):10741-9 and Geiszler et al., Neuroscience. 2016 Aug. 4; 329:98-111, the contents of each of which are incorporated herein by reference in their entirety).

[0990] The htau PHF seeding model may be used to test whether tau miRNA administration may have a therapeutic effect post-symptomatically. As a nonlimiting example, the seeding may occur prior to miRNA administration.

### Olfactory Bulb Propagation

[0991] PHF tau isolated from AD and/or FTLD patients is injected into the olfactory bulb (seeding) in 4-month-old htau female mice. Propagation of tau pathology from olfactory bulb to the first (e.g., piriform cortex, entorhinal cortex) and second (e.g. medial thalamus, hippocampus) synaptic connections are assessed following a given time interval, e.g., 12-16 weeks post-injection. Tau immunoreactivity is measured in the seeding and in the first and secondary synaptic brain areas using anti-tau antibodies, such as but not limited to the AT100 antibody (pSer²¹²/pSer²¹⁴; ThermoFisher, Waltham, MA; described in U.S. Pat. No. 6,121,003, the contents of which are herein incorporated in their entirety). Pilot experiments have been performed using AD isolated PHF. This model may be used to test anti-tau miRNA of the present disclosure in therapeutic setting.

### In Vivo Target Engagement and Potency

[0992] Identified miRNAs, such as those described in Example 2, are evaluated in vivo for target engagement. Mice (htau; 10 per dose group) are injected via intra-cisterna magna (ICM) with or without additional direct intraparenchymal (IPa) delivery routes at 2 months of age. Initial doses may include 5×10⁸, 5×10⁹, and/or 5×10¹⁰ vg/mouse for ICM or intra-thalamic injections. Mice may be euthanized at set intervals following dosing, such as but not limited to, 4-, 8- and 12-weeks post-dose. Hippocampus, cortex, thalamus, olfactory bulb, brainstem, striatum, cerebellum, spinal cord and liver are collected, and human tau levels from the transgene are quantified by quantitative reverse transcription polymerase chain reaction (RT-qPCR) and/or branched DNA, enzyme-linked immunosorbent assays (ELISAs) and/or immunohistochemistry (IHC).

[0993] Constructs showing >50% decrease in tau mRNA/protein expression are tested in a time-response study. Briefly, htau mice (n=6-10 mice) are injected with an ICM or intra-thalamic injection of tau miRNA constructs, tissue is collected at various time-points (e.g. 4-, 8- and 12-weeks), and human tau mRNA and protein levels are quantified.

[0994] Dose and time-point for optimal knock-down/suppression of expression are determined.

### In Vivo Efficacy of AAV Particle Administration

[0995] AAV particles showing >50% decrease of human tau protein in brain areas such as hippocampus, cortex, thalamus, brainstem, cerebellum and olfactory bulb are tested in P301S, as described by Allen et al., 2002 (Allen et al., 2002, J Neurosci. 2002 Nov. 1; 22(21):9340-51, the contents of which are incorporated herein by reference in their entirety), and/or htau mice, e.g., htau seeding and/or propagation models, are selected for efficacy studies. Mice (n=8-12) are injected with AAV particles (ICM) with or without direct IPa administration into the thalamus) at various doses and evaluated for multiple efficacy outcomes. Nervous system tissue regions such as hippocampus, cortex, thalamus, olfactory bulb, brainstem, striatum, cerebellum, spinal cord, as well as the liver, are collected, and human tau levels are quantified by RT-qPCR and/or branched DNA, ELISAs and/or IHC. Brain lysate from mice in the treatment and control groups are tested for tau seeding activity using biosensor cells, as described by Frost et al., 2009 (Frost et al., J Biol Chem. 2009 May 8; 284(19):12845-52, the contents of where are incorporated herein by reference in their entirety). Versus the control group, no or minimal tau seeding activity (e.g., tau aggregation) may be observed in brain lysate isolated from treatment groups demonstrating efficacy in decreasing tau pathology.

[0996] A comparison of the in vivo efficacy of AAV anti-tau miRNAs versus anti-tau antisense oligonucleotides (ASOs) and/or vectorized anti-tau antibody efficacy is performed. Whether efficacy of AAV anti-tau miRNA treatment is equivalent, superior, or inferior compared to efficacy comparators, e.g., anti-tau ASO and/or vectorized anti-tau antibody, as described above (Example 1), and/or is additive with anti-tau ASO or vectorized anti-tau antibody in combination, is determined. Thus, anti-tau ASOs or vectorized anti-tau antibody will be run in parallel and together with AAV anti-tau miRNAs to provide a head-to-head comparator, as well as to inform whether co-treating provides synergy.

[0997] Based on in vivo efficacy data, up to 3 constructs are selected for additional studies. Data obtained in this example will include a minimally efficacious dose (MED) for in vivo efficacy, data related to therapeutic index (efficacious dose and tolerability findings). These data, in combination with target engagement data are used to drive additional experimental design and/or parameters, e.g., dose selection.

### In Vivo Non-Human Primate (NHP) Studies

[0998] In non-human primates, AAV particles or vehicle are delivered via IM, IP, ICV, IPa or IT administration routes at a number of doses within a set dose range. The administration may include one or more injections over a period of time. Clinical signs are documented and behavioral tests, e.g. the delayed response task, are performed. At a pre-set day and time following the administration, animals are sacrificed, and select tissues harvested for bioanalytical and histological evaluation. Brain regions included in evaluation may include frontal and temporal lobes, as well as many other brain regions, such as but not limited to, basal ganglia, cerebellum, parietal lobe and brainstem. Hence, entire brain regions would be assessed, including deep structures and cerebellum. Tau protein and mRNA levels are assessed for tau/MAPT suppression following administration of AAV particles comprising vector genomes that encode MAPT siRNA versus vehicle.

### Route of Administration (ROA) and Capsid Evaluation

[0999] Multiple routes of administration (ROA) using different capsids will be evaluated for comparison against AAV9 intra-cisterna magna (ICM) and thalamic intraparenchymal (IPa) administration.

[1000] Up to 4 different capsids, e.g., VOY101, AAV9, AVrh10, and AAV1 are selected. A single transgene tool construct is used for biodistribution studies. This may include a tool of vectorized anti-tau antibody and/or another well-validated transgene target.

[1001] NHP receive ICM and/or intrathalamic IPa injections of transgene tool construct at various doses. At a pre-selected time-point (e.g., 1-2 months post injection), NHPs are euthanized and brain, spinal cord, and peripheral tissues are collected. Tissue punches from multiple brain regions are collected from the left hemisphere and vector genome and anti-tau antibody or frataxin transgene mRNA levels are quantified from the same sample. Additionally, the right hemisphere is utilized for IHC (or in situ hybridization, ISH) analysis of tool construct expression.

### Example 6. Evaluation of Vectorized MAPT siRNAs In Vivo in Mice

[1002] This Example investigates the ability of the modulatory polynucleotide VOYTaumiR-127-530 (SEQ ID NO: 4405) and/or VOYTaumiR-127-579 (SEQ ID NO: 4408) to inhibit and reduce expression of MAPT (human tau) in vivo at varying doses. These constructs also demonstrated increased activity in vitro as shown in Example 3.

[1003] In a first study, AAV particles were generated with the VOY9P39 capsid (SEQ ID NO: 5147) or the VOY101 (SEQ ID NO: 1) encapsulating the VOYTaumiR-127-530 modulatory polynucleotide (SEQ ID NO: 4405) driven by a CBA promoter encoded by a self-complementary viral genome. The self-complementary viral genome comprised the nucleotide sequence of SEQ ID NO: 5173. The AAV particles comprising the VOY9P39 capsid encoding the VOYTaumiR-127-530 modulatory polynucleotide were intravenously administered to hTau mice (female; 12-13 weeks old, n=6) at increasing doses of 3e12 vg/kg (low), 1e13 vg/kg (mid), or 3e13 vg/kg (high). AAV particles comprising the VOY101 capsid encoding the VOYTaumiR-127-530 modulatory polynucleotide or an mCherry reporter control; or AAV particles comprising the VOY9P39 capsid encoding a non-targeting control or an mCherry reporter control were intravenously administered to hTau mice at a dose of 3e13 vg/kg. A group of mice also received a non treatment vehicle control (n=6). The in-life period was four weeks and brains, livers, spinal cord, serum, and/or CSF were collected from the mice to measure tau knockdown (mRNA and protein levels) and biodistribution. The body weight and cage side observations for all mice throughout the study were normal and no significant changes were observed.

[1004] Table 21 and FIGS. 5A-5E, provide the AAV biodistribution observed in the cortex, hippocampus, brainstem, thalamus, and liver following intravenous administration of the AAV particles comprising the VOY9P39 or VOY101 capsid protein encoding the VOYTaumiR-127-530 modulatory polynucleotide, the non-targeting control (NTC), or the mCherry reporter control construct. Good biodistribution was observed in all brain regions investigated. Additionally, a dose dependent increase was observed in the biodistribution (vg copies per diploid cells (vg/dg)) in the cortex, hippocampus, brainstem, and thalamus in the mice that received the increasing doses of the AAV particles comprising the VOY9P39 capsid encoding the VOYTaumiR-127-530 modulatory polynucleotide (Table 21 and FIGS. 5A-5D). Low levels of vg/dg (biodistribution) were observed in the liver of the mice when administered the AAV particles comprising the VOY9P39 capsid (Table 21 and FIG. 5E).

TABLE 21
Biodistribution (vg/dg) in the brain of mice post-intravenous injection of AAV particles
comprising the VOY9P39 or VOY101 capsid protein encoding the VOYTaumiR-127-530 modulatory
polynucleotide, non-target control, or the mCherry reporter control

| | | Dose | VG/DG | | | | |
|---|---|---|---|---|---|---|---|
| Payload | Capsid | (vg/kg) | Cortex | Hippocampus | Brainstem | Thalamus | Liver |
| mCherry Reporter Control | VOY9P39 | 3e13 | 45.5 | 27.1 | 61.2 | 49.6 | 5.6 |
| Non-Target Control | VOY9P39 | 3e13 | 38.4 | 20.7 | 47.7 | 39.6 | 2.2 |
| VOYTaumiR-127-530 | VOY9P39 | 3e12 | 14.3 | 5.6 | 18.6 | 13.8 | 0.4 |
| VOYTaumiR-127-530 | VOY9P39 | 1e13 | 21.9 | 9.1 | 30.6 | 24.7 | 0.9 |
| VOYTaumiR-127-530 | VOY9P39 | 3e13 | 57.5 | 22.6 | 66.5 | 55.8 | 5.5 |
| mCherry Reporter Control | VOY101 | 3e13 | 63.3 | 33.3 | 74.0 | 66.5 | 22.0 |
| VOYTaumiR-127-530 | VOY101 | 3e13 | 46.5 | 28.0 | 59.5 | 48.5 | 27.4 |

[1005] The ability of vectorized VOYTaumiR-127-530 modulatory polynucleotide (SEQ ID NO: 4405) to reduce MAPT mRNA expression was also determined in the cortex, hippocampus, thalamus, and brainstem of mice at 4 weeks post intravenous administration. The amount of MAPT mRNA remaining after treatment was measured by qPCR and normalized to a housekeeping gene (endogenous XPNPEP1) and the fold-change in MAPT mRNA remaining in the groups receiving the increasing doses of the VOYTaumiR-127-530 modulatory polynucleotide relative to the vehicle was determined. As shown in FIGS. 6A-6D, MAPT mRNA was reduced in all mice that received AAV particles encoding the VOYTaumiR-127-530 modulatory polynucleotide, relative to the groups that received the non-targeting control or the mCherry reporter control. Additionally, AAV particles encoding the VOYTaumiR-127-530 modulatory polynucleotide comprising the VOY9P39 capsid protein or the VOY1010 capsid protein led to comparable levels of MAPT mRNA knockdown in the brain tissues investigated (FIGS. 6A-6D). As shown in FIGS. 6A-6D, a trending dose response was observed in MAPT mRNA knockdown in the cortex, hippocampus, thalamus, and brainstem when mice were intravenously administered AAV particles comprising the VOY9P39 capsid and encoding the VOYTaumiR-127-530 modulatory polynucleotide at 3e12 vg/kg, 1e13 vg/kg, or 3e13 vg/kg. The fold-change in MAPT mRNA remaining in the groups receiving the increasing doses of the VOYTaumiR-127-530 modulatory polynucleotide relative to the vehicle or non-target control is shown in Table 22. The percent MAPT knockdown was calculated in the hippocampus, cortex and brainstem and is provided in Table 23. At least a 70% knockdown and up to a 90% knockdown was observed in the brain following treatment with the VOYTaumiR-127-530 modulatory polynucleotide targeting MAPT at the highest dose tested (3e13 vg/kg) (Table 23). Even at the low dose of 3e12 vg/kg, 44-76% knockdown of MAPT mRNA was observed in different regions of the mouse brain four weeks post treatment with vectorized VOYTaumiR-127-530, which targets MAPT (Table 23).

TABLE 22
Fold change in MAPT mRNA levels in the brain of mice post-intravenous
injection of AAV particles encoding the VOYTaumiR-127-530 modulatory
polynucleotide relative to MAPT mRNA levels in the brain of mice receiving
the vehicle control or AAV particles encoding a non-target control

| Payload | Capsid | Dose (vg/kg) | Cortex | Hippocampus | Thalamus | Brainstem |
|---|---|---|---|---|---|---|
| | | | Fold Change relative to Vehicle | | | |
| Vehicle | N/A | N/A | 1.00 | 1.00 | 1.00 | 1.00 |
| VOYTaumiR-127-530 | VOY9P39 | 3e12 | 0.24 | 0.42 | 0.27 | 0.25 |
| VOYTaumiR-127-530 | VOY9P39 | 1e13 | 0.17 | 0.32 | 0.28 | 0.21 |
| VOYTaumiR-127-530 | VOY9P39 | 3e13 | 0.10 | 0.27 | 0.18 | 0.13 |
| | | | Fold Change relative to Non-Target Control | | | |
| Non-Target Control | VOY9P39 | 3c13 | 1.00 | 1.00 | 1.00 | 1.00 |
| VOYTaumiR-127-530 | VOY9P39 | 3e12 | 0.24 | 0.53 | 0.38 | 0.21 |
| VOYTaumiR-127-530 | VOY9P39 | 1e13 | 0.17 | 0.41 | 0.40 | 0.18 |
| VOYTaumiR-127-530 | VOY9P39 | 3e13 | 0.10 | 0.34 | 0.26 | 0.11 |

TABLE 23
Percent knockdown of MAPT mRNA in the brain of mice post-intravenous
injection of AAV particles comprising the VOY9P39 capsid and
encoding the VOYTaumiR-127-530 modulatory polynucleotide

| | | Dose | Percent Knockdown of mRNA levels | | |
|---|---|---|---|---|---|
| Payload | Capsid | (vg/kg) | Cortex | Hippocampus | Brainstem |
| VOYTaumiR-127-530 | VOY9P39 | 3e12 | 76% | 44% | 75% |
| VOYTaumiR-127-530 | VOY9P39 | 1e13 | 84% | 64% | 79% |
| VOYTaumiR-127-530 | VOY9P39 | 3e13 | 90% | 69% | 87% |

[1006] A linear regression was performed to determine the relationship between viral genome levels and MAPT mRNA levels remaining relative to the vehicle in the brain regions at 4 weeks post-intravenous treatment with the AAV particles comprising the VOY9P39 capsid and encoding the VOYTaumiR-127-530 modulatory polynucleotide. A negative correlation was observed between the MAPT mRNA levels and the viral genome levels. The R² value in the cortex was 0.7172 (p<0.0001); the R² value in the hippocampus was 0.4143 (p=0.0053); the R² value in the thalamus was 0.4907 (p=0.0017); and the R² value in the brainstem was 0.8667 (p<0.0001).

[1007] Total tau protein levels in the cortex, thalamus, and brainstem following treatment with the AAV particles comprising the VOY9P39 capsid and encoding the VOYTaumiR-127-530 modulatory polynucleotide were determined by AlphaLISA. As shown in FIGS. 7A-7D and Table 24, knockdown in total tau protein level was observed across all brain regions, with the cortex, thalamus, and brainstem showing significant reductions. This knockdown was specific for total tau protein, as no decrease in beta-actin protein levels were observed in the cortex by Western blot.

TABLE 24
Percent knockdown of MAPT protein and total MAPT protein remaining relative to the vehicle
control in the brain of mice post-intravenous injection of AAV particles comprising
the VOY9P39 capsid and encoding the VOYTaumiR-127-530 modulatory polynucleotide

| Payload | Capsid | Dose (vg/kg) | Cortex | Hippocampus | Thalamus | Brainstem |
|---|---|---|---|---|---|---|
| | | | Percent Knockdown of Protein | | | |
| VOYTaumiR-127-530 | VOY9P39 | 3e12 | 65% | 37% | 65% | 65% |
| VOYTaumiR-127-530 | VOY9P39 | 1e13 | 72% | 17% | 53% | 63% |
| VOYTaumiR-127-530 | VOY9P39 | 3e13 | 74% | 46% | 60% | 64% |
| | | | Tau Protein Levels Remaining relative to Vehicle Control | | | |
| Vehicle | N/A | N/A | 1.0 | 1.0 | 1.0 | 1.0 |
| VOYTaumiR-127-530 | VOY9P39 | 3e12 | 0.35 | 0.63 | 0.43 | 0.36 |
| VOYTaumiR-127-530 | VOY9P39 | 1e13 | 0.29 | 0.83 | 0.47 | 0.38 |
| VOYTaumiR-127-530 | VOY9P39 | 3e13 | 0.27 | 0.54 | 0.40 | 0.36 |

[1008] Small RNA processing analysis via high throughput small RNA deep sequencing to measure guide to passenger ratio, abundance of guide and passenger strands relative to the total endogenous pool of miRNAs (saturation level of the endogenous miRNA pathway), and precision of processing at the 5′-end of the guide strand was also performed on RNA isolated from the cortex 4 weeks post-intravenous treatment with the AAV particles comprising the VOY9P39 capsid and encoding the VOYTaumiR-127-530 modulatory polynucleotide. Table 25 shows the level of mature exogenous MAPT targeting polynucleotides relative to the total endogenous pool of miRNAs to ensure a lack of overharnessing of the endogenous miRNA biogenesis pathway, where a lower percentage is more favorable to prevent any effects related to endogenous miRNA pathway saturation. The guide to passenger strand level is also provided in Table 25. A higher guide to passenger strand ratio is more favorable for potency and selectivity and to minimize any passenger strand effects. Table 25 also shows the 5′ end processing of the modulatory polynucleotides evaluated. The 5′ end processing of the modulatory polynucleotides indicates that the constructs are being processed correctly at the 5′ end and a higher value is more favorable. As the seed region is used for recognition of the target mRNA and starts at a fixed position relative to the 5′ end of the guide strand, accurate processing of the 5′ end of the guide strand is needed. Both doses of VOYTaumiR-127-530 tested led to 89-90% in the 5′ end processing.

TABLE 25
Guide to passenger ratio, abundance of guide and passenger strands relative
to the total endogenous pool of miRNAs (% endogenous), and precision of processing
at the 5′-end of the guide strand for the VOYTaumiR-127-530 modulatory polynucleotides
in the cortex 4-weeks post-intravenous injection in mice

| | | Dose | | Guide/Passenger | 5′ Precision |
|---|---|---|---|---|---|
| Payload | Capsid | (vg/kg) | % Endogenous | Ratio | Processing (%) |
| VOYTaumiR-127- | VOY9P39 | 3e12 | 2.79% | 34.59 | 91.77% |
| 530 | | | | | |
| VOYTaumiR-127- | VOY9P39 | 3e13 | 5.67% | 29.60 | 89.16% |
| 530 | | | | | |
| Vehicle | N/A | N/A | 0.005% | N/A | 97.08% |

[1009] In a second study, AV particles were generated with the VOY9P39 capsid (SEQ ID NO: 5147) encapsulating the VOYTaumiR-127-530 modulatory polynucleotide (SEQ ID NO: 4405), the VOYTaumiR-127-579 (SEQ ID NO: 4408) modulatory polynucleotide, or a non-target control (NTC) modulatory polynucleotide driven by a CBA promoter encoded by a self-complementary viral genome. The self-complementary viral genome encoding VOYTaumiR-127-530 comprised the nucleotide sequence of SEQ ID NO: 5173; and the self-complementary viral genome encoding VOYTaumiR-127-579 comprised the nucleotide sequence of SEQ ID NO: 5195. The AAV particles comprising the VOY9P39 capsid encoding the VOYTaumiR-127-530 modulatory polynucleotide were intravenously administered to hTau mice (female; 17-18 weeks old, n=6) at a high dose of 1e13 vg/kg or a low dose of 1e12 vg/kg. The AAV particles comprising the VOY9P39 capsid encoding the VOYTaumiR-127-579 modulatory polynucleotide or the non-target control construct were intravenously administered to hTau mice (female; 17-18 weeks old, n=6) at the high dose of 1e13 vg/kg. The in-life period was four weeks and brains were collected from the mice to measure tau knockdown.

[1010] The amount of MAPT mRNA remaining after treatment was measured by qPCR and normalized to a housekeeping gene (endogenous XPNPEP1) in the cortex, hippocampus, thalamus, and brainstem. The fold-change in MAPT mRNA remaining in the groups receiving the VOYTaumiR-127-530 or VOYTaumiR-127-579 modulatory polynucleotide relative to the vehicle was determined (FIGS. 8A-8D). As shown in FIGS. 8A-8D, MAPT mRNA was reduced across all brain regions investigated, including the cortex, hippocampus, thalamus, and brainstem, at 4 weeks post-treatment with AAV particles encoding the VOYTaumiR-127-530 or VOYTaumiR-127-579 modulatory polynucleotide. Additionally, a dose response was observed in these brain regions in the mice that received the high and low dose of AAV particles encoding the VOYTaumiR-127-530 modulatory polynucleotide (FIGS. 8A-8D).

[1011] Taken together, these in vivo data demonstrate good biodistribution and/or knock down of MAPT following intravenous administration of AAV particles encoding the VOYTaumiR-127-530 modulatory polynucleotide or the VOYTaumiR-127-579 modulatory polynucleotide which target MAPT.

### VII. EQUIVALENTS AND SCOPE

[1012] The disclosures of each and every patent, patent application, and publication cited herein are hereby incorporated herein by reference in their entirety. While this invention has been disclosed with reference to certain embodiments, it is apparent that further embodiments and variations of this invention may be devised by others skilled in the art without departing from the true spirit and scope of the invention. The appended claims are intended to be construed to include all such embodiments and equivalent variations.

The application's sequence listing, which the Patent Office published only in electronic form, follows.

SEQUENCE LISTING (5200 sequences)

SEQ ID NO: 1 - protein, 743 aa, synthetic construct
MAADGYLPDWLEDNLSEGIREWWALKPGAPQPKANQQHQDNARGLVLPGYKYLGPGNGLDKGEPVNAADAAALEHDKAYDQQLKAGDNPYLKYNHADAEFQERLKEDTSFGGNLGRAVFQAKKRLLEPLGLVEEAAKTAPGKKRPVEQSPQEPDSSAGIGKSGAQPAKKRLNFGQTGDTESVPDPQPIGEPPAAPSGVGSLTMASGGGAPVADNNEGADGVGSSSGNWHCDSQWLGDRVITTSTRTWALPTYNNHLYKQISNSTSGGSSNDNAYFGYSTPWGYFDFNRFHCHFSPRDWQRLINNNWGFRPKRLNFKLFNIQVKEVTDNNGVKTIANNLTSTVQVFTDSDYQLPYVLGSAHEGCLPPFPADVFMIPQYGYLTLNDGSQAVGRSSFYCLEYFPSQMLRTGNNFQFSYEFENVPFHSSYAHSQSLDRLMNPLIDQYLYYLSKTINGSGQNQQTLKFSVAGPSNMAVQGRNYIPGPSYRQQRVSTTVTQNNNSEFAWPGASSWALNGRNSLMNPGPAMASHKEGEDRFFPLSGSLIFGKQGTGRDNVDADKVMITNEEEIKTTNPVATESYGQVATNHQSDGTLAVPFKAQAQTGWVQNQGILPGMVWQDRDVYLQGPIWAKIPHTDGNFHPSPLMGGFGMKHPPPQILIKNTPVPADPPTAFNKDKLNSFITQYSTGQVSVEIEWELQKENSKRWNPEIQYTSNYYKSNNVEFAVNTEGVYSEPRPIGTRYLTRNL

SEQ ID NO: 2 - skipped

SEQ ID NO: 3 - protein, 743 aa, synthetic construct
MAADGYLPDWLEDNLSEGIREWWALKPGAPQPKANQQHQDNARGLVLPGYKYLGPGNGLDKGEPVNAADAAALEHDKAYDQQLKAGDNPYLKYNHADAEFQERLKEDTSFGGNLGRAVFQAKKRLLEPLGLVEEAAKTAPGKKRPVEQSPQEPDSSAGIGKSGAQPAKKRLNFGQTGDTESVPDPQPIGEPPAAPSGVGSLTMASGGGAPVADNNEGADGVGSSSGNWHCDSQWLGDRVITTSTRTWALPTYNNHLYKQISNSTSGGSSNDNAYFGYSTPWGYFDFNRFHCHFSPRDWQRLINNNWGFRPKRLNFKLFNIQVKEVTDNNGVKTIANNLTSTVQVFTDSDYQLPYVLGSAHEGCLPPFPADVFMIPQYGYLTLNDGSQAVGRSSFYCLEYFPSQMLRTGNNFQFSYEFENVPFHSSYAHSQSLDRLMNPLIDQYLYYLSRTINGSGQNQQTLKFSVAGPSNMAVQGRNYIPGPSYRQQRVSTTVTQNNNSEFAWPGASSWALNGRNSLMNPGPAMASHKEGEDRFFPLSGSLIFGKQGTGRDNVDADKVMITNEEEIKTTNPVATESYGQVATNHQSDGTLAVPFKAQAQTGWVQNQGILPGMVWQDRDVYLQGPIWAKIPHTDGNFHPSPLMGGFGMKHPPPQILIKNTPVPADPPTAFNKDKLNSFITQYSTGQVSVEIEWELQKENSKRWNPEIQYTSNYYKSNNVEFAVNTEGVYSEPRPIGTRYLTRNL

SEQ ID NO: 4-10 - skipped (7 entries)

SEQ ID NO: 11 - protein, 736 aa, synthetic construct
MAADGYLPDWLEDNLSEGIREWWALKPGAPQPKANQQHQDNARGLVLPGYKYLGPGNGLDKGEPVNAADAAALEHDKAYDQQLKAGDNPYLKYNHADAEFQERLKEDTSFGGNLGRAVFQAKKRLLEPLGLVEEAAKTAPGKKRPVEQSPQEPDSSAGIGKSGAQPAKKRLNFGQTGDTESVPDPQPIGEPPAAPSGVGSLTMASGGGAPVADNNEGADGVGSSSGNWHCDSQWLGDRVITTSTRTWALPTYNNHLYKQISNSTSGGSSNDNAYFGYSTPWGYFDFNRFHCHFSPRDWQRLINNNWGFRPKRLNFKLFNIQVKEVTDNNGVKTIANNLTSTVQVFTDSDYQLPYVLGSAHEGCLPPFPADVFMIPQYGYLTLNDGSQAVGRSSFYCLEYFPSQMLRTGNNFQFSYEFENVPFHSSYAHSQSLDRLMNPLIDQYLYYLSRTINGSGQNQQTLKFSVAGPSNMAVQGRNYIPGPSYRQQRVSTTVTQNNNSEFAWPGASSWALNGRNSLMNPGPAMASHKEGEDRFFPLSGSLIFGKQGTGRDNVDADKVMITNEEEIKTTNPVATESYGQVATNHQSAQAQAQTGWVQNQGILPGMVWQDRDVYLQGPIWAKIPHTDGNFHPSPLMGGFGMKHPPPQILIKNTPVPADPPTAFNKDKLNSFITQYSTGQVSVEIEWELQKENSKRWNPEIQYTSNYYKSNNVEFAVNTEGVYSEPRPIGTRYLTRNL

SEQ ID NO: 12 - protein, 743 aa, synthetic construct
MAADGYLPDWLEDNLSEGIREWWALKPGAPQPKANQQHQDNARGLVLPGYKYLGPGNGLDKGEPVNAADAAALEHDKAYDQQLKAGDNPYLKYNHADAEFQERLKEDTSFGGNLGRAVFQAKKRLLEPLGLVEEAAKTAPGKKRPVEQSPQEPDSSAGIGKSGAQPAKKRLNFGQTGDTESVPDPQPIGEPPAAPSGVGSLTMASGGGAPVADNNEGADGVGSSSGNWHCDSQWLGDRVITTSTRTWALPTYNNHLYKQISNSTSGGSSNDNAYFGYSTPWGYFDFNRFHCHFSPRDWQRLINNNWGFRPKRLNFKLFNIQVKEVTDNNGVKTIANNLTSTVQVFTDSDYQLPYVLGSAHEGCLPPFPADVFMIPQYGYLTLNDGSQAVGRSSFYCLEYFPSQMLRTGNNFQFSYEFENVPFHSSYAHSQSLDRLMNPLIDQYLYYLSRTINGSGQNQQTLKFSVAGPSNMAVQGRNYIPGPSYRQQRVSTTVTQNNNSEFAWPGASSWALNGRNSLMNPGPAMASHKEGEDRFFPLSGSLIFGKQGTGRDNVDADKVMITNEEEIKTTNPVATESYGQVATNHQSAQTLAVPFKAQAQTGWVQNQGILPGMVWQDRDVYLQGPIWAKIPHTDGNFHPSPLMGGFGMKHPPPQILIKNTPVPADPPTAFNKDKLNSFITQYSTGQVSVEIEWELQKENSKRWNPEIQYTSNYYKSNNVEFAVNTEGVYSEPRPIGTRYLTRNL

SEQ ID NO: 13 - protein, 743 aa, synthetic construct
MAADGYLPDWLEDNLSEGIREWWALKPGAPQPKANQQHQDNARGLVLPGYKYLGPGNGLDKGEPVNAADAAALEHDKAYDQQLKAGDNPYLKYNHADAEFQERLKEDTSFGGNLGRAVFQAKKRLLEPLGLVEEAAKTAPGKKRPVEQSPQEPDSSAGIGKSGAQPAKKRLNFGQTGDTESVPDPQPIGEPPAAPSGVGSLTMASGGGAPVADNNEGADGVGSSSGNWHCDSQWLGDRVITTSTRTWALPTYNNHLYKQISNSTSGGSSNDNAYFGYSTPWGYFDFNRFHCHFSPRDWQRLINNNWGFRPKRLNFKLFNIQVKEVTDNNGVKTIANNLTSTVQVFTDSDYQLPYVLGSAHEGCLPPFPADVFMIPQYGYLTLNDGSQAVGRSSFYCLEYFPSQMLRTGNNFQFSYEFENVPFHSSYAHSQSLDRLMNPLIDQYLYYLSRTINGSGQNQQTLKFSVAGPSNMAVQGRNYIPGPSYRQQRVSTTVTQNNNSEFAWPGASSWALNGRNSLMNPGPAMASHKEGEDRFFPLSGSLIFGKQGTGRDNVDADKVMITNEEEIKTTNPVATESYGQVATNHQSAQTLAVPFSNPAQTGWVQNQGILPGMVWQDRDVYLQGPIWAKIPHTDGNFHPSPLMGGFGMKHPPPQILIKNTPVPADPPTAFNKDKLNSFITQYSTGQVSVEIEWELQKENSKRWNPEIQYTSNYYKSNNVEFAVNTEGVYSEPRPIGTRYLTRNL

SEQ ID NO: 14 - protein, 738 aa, unidentified
MAADGYLPDWLEDNLSEGIREWWDLKPGAPKPKANQQKQDDGRGLVLPGYKYLGPFNGLDKGEPVNAADAAALEHDKAYDQQLKAGDNPYLRYNHADAEFQERLQEDTSFGGNLGRAVFQAKKRVLEPLGLVEEGAKTAPGKKRPVEPSPQRSPDSSTGIGKKGQQPAKKRLNFGQTGDSESVPDPQPIGEPPAGPSGLGSGTMAAGGGAPMADNNEGADGVGSSSGNWHCDSTWLGDRVITTSTRTWALPTYNNHLYKQISNGTSGGSTNDNTYFGYSTPWGYFDFNRFHCHFSPRDWQRLINNNWGFRPKRLNFKLFNIQVKEVTQNEGTKTIANNLTSTIQVFTDSEYQLPYVLGSAHQGCLPPFPADVFMIPQYGYLTLNNGSQAVGRSSFYCLEYFPSQMLRTGNNFEFSYQFEDVPFHSSYAHSQSLDRLMNPLIDQYLYYLSRTQSTGGTAGTQQLLFSQAGPNNMSAQAKNWLPGPCYRQQRVSTTLSQNNNSNFAWTGATKYHLNGRDSLVNPGVAMATHKDDEERFFPSSGVLMFGKQGAGKDNVDYSSVMLTSEEEIKTTNPVATEQYGVVADNLQQQNAAPIVGAVNSQGALPGMVWQNRDVYLQGPIWAKIPHTDGNFHPSPLMGGFGLKHPPPQILIKNTPVPADPPTTFSQAKLASFITQYSTGQVSVEIEWELQKENSKRWNPEIQYTSNYYKSTNVDFAVNTDGTYSEPRPIGTRYLTRNL

SEQ ID NO: 15 - DNA, 2217 bp, unidentified
  source 1..2217: mol_type = unassigned DNA
atggctgccgatggttatcttccagattggctcgaggacaacctctctgagggcattcgcgagtggtgggacttgaaacctggagccccgaaacccaaagccaaccagcaaaagcaggacgacggccggggtctggtgcttcctggctacaagtacctcggacccttcaacggactcgacaagggggagcccgtcaacgcggcggacgcagcggccctcgagcacgacaaggcctacgaccagcagctcaaagcgggtgacaatccgtacctgcggtataaccacgccgacgccgagtttcaggagcgtctgcaagaagatacgtcttttgggggcaacctcgggcgagcagtcttccaggccaagaagcgggttctcgaacctctcggtctggttgaggaaggcgctaagacggctcctggaaagaagagaccggtagagccatcaccccagcgttctccagactcctctacgggcatcggcaagaaaggccagcagcccgcgaaaaagagactcaactttgggcagactggcgactcagagtcagtgcccgaccctcaaccaatcggagaaccccccgcaggcccctctggtctgggatctggtacaatggctgcaggcggtggcgctccaatggcagacaataacgaaggcgccgacggagtgggtagttcctcaggaaattggcattgcgattccacatggctgggcgacagagtcatcaccaccagcacccgaacctgggccctccccacctacaacaaccacctctacaagcaaatctccaacgggacttcgggaggaagcaccaacgacaacacctacttcggctacagcaccccctgggggtattttgactttaacagattccactgccacttctcaccacgtgactggcagcgactcatcaacaacaactggggattccggcccaagagactcaacttcaagctcttcaacatccaggtcaaggaggtcacgcagaatgaaggcaccaagaccatcgccaataaccttaccagcacgattcaggtctttacggactcggaataccagctcccgtacgtcctcggctctgcgcaccagggctgcctgcctccgttcccggcggacgtcttcatgattcctcagtacgggtacctgactctgaacaatggcagtcaggccgtgggccgttcctccttctactgcctggagtactttccttctcaaatgctgagaacgggcaacaactttgagttcagctaccagtttgaggacgtgccttttcacagcagctacgcgcacagccaaagcctggaccggctgatgaaccccctcatcgaccagtacctgtactacctgtctcggactcagtccacgggaggtaccgcaggaactcagcagttgctattttctcaggccgggcctaataacatgtcggctcaggccaaaaactggctacccgggccctgctaccggcagcaacgcgtctccacgacactgtcgcaaaataacaacagcaactttgcctggaccggtgccaccaagtatcatctgaatggcagagactctctggtaaatcccggtgtcgctatggcaacccacaaggacgacgaagagcgattttttccgtccagcggagtcttaatgtttgggaaacagggagctggaaaagacaacgtggactatagcagcgttatgctaaccagtgaggaagaaattaaaaccaccaacccagtggccacagaacagtacggcgtggtggccgataacctgcaacagcaaaacgccgctcctattgtaggggccgtcaacagtcaaggagccttacctggcatggtctggcagaaccgggacgtgtacctgcagggtcctatctgggccaagattcctcacacggacggaaactttcatccctcgccgctgatgggaggctttggactgaaacacccgcctcctcagatcctgattaagaatacacctgttcccgcggatcctccaactaccttcagtcaagctaagctggcgtcgttcatcacgcagtacagcaccggacaggtcagcgtggaaattgaatgggagctgcagaaagaaaacagcaaacgctggaacccagagattcaatacacttccaactactacaaatctacaaatgtggactttgctgttaacacagatggcacttattctgagcctcgccccatcggcacccgttacctcacccgtaatctgtaa

SEQ ID NO: 16 - protein, 735 aa, Adeno-associated virus 2 [sequence omitted]

SEQ ID NO: 17 - DNA, 2208 bp, Adeno-associated virus 2
  source 1..2208: mol_type = genomic DNA
atggctgccgatggttatcttccagattggctcgaggacactctctctgaaggaataagacagtggtggaagctcaaacctggcccaccaccaccaaagcccgcagagcggcataaggacgacagcaggggtcttgtgcttcctgggtacaagtacctcggacccttcaacggactcgacaagggagagccggtcaacgaggcagacgccgcggccctcgagcacgacaaagcctacgaccggcagctcgacagcggagacaacccgtacctcaagtacaaccacgccgacgcggagtttcaggagcgccttaaagaagatacgtcttttgggggcaacctcggacgagcagtcttccaggcgaaaaagagggttcttgaacctctgggcctggttgaggaacctgttaagacggctccgggaaaaaagaggccggtagagcactctcctgtggagccagactcctcctcgggaaccggaaaggcgggccagcagcctgcaagaaaaagattgaattttggtcagactggagacgcagactcagtacctgacccccagcctctcggacagccaccagcagccccctctggtctgggaactaatacgatggctacaggcagtggcgcaccaatggcagacaataacgagggcgccgacggagtgggtaattcctcgggaaattggcattgcgattccacatggatgggcgacagagtcatcaccaccagcacccgaacctgggccctgcccacctacaacaaccacctctacaaacaaatttccagccaatcaggagcctcgaacgacaatcactactttggctacagcaccccttgggggtattttgacttcaacagattccactgccacttttcaccacgtgactggcaaagactcatcaacaacaactggggattccgacccaagagactcaacttcaagctctttaacattcaagtcaaagaggtcacgcagaatgacggtacgacgacgattgccaataaccttaccagcacggttcaggtgtttactgactcggagtaccagctcccgtacgtcctcggctcggcgcatcaaggatgcctcccgccgttcccagcagacgtcttcatggtgccacagtatggatacctcaccctgaacaacgggagtcaggcagtaggacgctcttcattttactgcctggagtactttccttctcagatgctgcgtaccggaaacaactttaccttcagctacacttttgaggacgttcctttccacagcagctacgctcacagccagagtctggaccgtctcatgaatcctctcatcgaccagtacctgtattacttgagcagaacaaacactccaagtggaaccaccacgcagtcaaggcttcagttttctcaggccggagcgagtgacattcgggaccagtctaggaactggcttcctggaccctgttaccgccagcagcgagtatcaaagacatctgcggataacaacaacagtgaatactcgtggactggagctaccaagtaccacctcaatggcagagactctctggtgaatccgggcccggccatggcaagccacaaggacgatgaagaaaagttttttcctcagagcggggttctcatctttgggaagcaaggctcagagaaaacaaatgtggacattgaaaaggtcatgattacagacgaagaggaaatcaggacaaccaatcccgtggctacggagcagtatggttctgtatctaccaacctccagagaggcaacagacaagcagctaccgcagatgtcaacacacaaggcgttcttccaggcatggtctggcaggacagagatgtgtaccttcaggggcccatctgggcaaagattccacacacggacggacattttcacccctctcccctcatgggtggattcggacttaaacaccctcctccacagattctcatcaagaacaccccggtacctgcgaatccttcgaccaccttcagtgcggcaaagtttgcttccttcatcacacagtactccacgggacaggtcagcgtggagatcgagtgggagctgcagaaggaaaacagcaaacgctggaatcccgaaattcagtacacttccaactacaacaagtctgttaatgtggactttactgtggacactaatggcgtgtattcagagcctcgccccattggcaccagatacctgactcgtaatctgtaa

SEQ ID NO: 18 - protein, 736 aa, Adeno-associated virus 1
MAADGYLPDWLEDNLSEGIREWWDLKPGAPKPKANQQKQDDGRGLVLPGYKYLGPFNGLDKGEPVNAADAAALEHDKAYDQQLKAGDNPYLRYNHADAEFQERLQEDTSFGGNLGRAVFQAKKRVLEPLGLVEEGAKTAPGKKRPVEQSPQEPDSSSGIGKTGQQPAKKRLNFGQTGDSESVPDPQPLGEPPATPAAVGPTTMASGGGAPMADNNEGADGVGNASGNWHCDSTWLGDRVITTSTRTWALPTYNNHLYKQISSASTGASNDNHYFGYSTPWGYFDFNRFHCHFSPRDWQRLINNNWGFRPKRLNFKLFNIQVKEVTTNDGVTTIANNLTSTVQVFSDSEYQLPYVLGSAHQGCLPPFPADVFMIPQYGYLTLNNGSQAVGRSSFYCLEYFPSQMLRTGNNFTFSYTFEEVPFHSSYAHSQSLDRLMNPLIDQYLYYLNRTQNQSGSAQNKDLLFSRGSPAGMSVQPKNWLPGPCYRQQRVSKTKTDNNNSNFTWTGASKYNLNGRESIINPGTAMASHKDDEDKFFPMSGVMIFGKESAGASNTALDNVMITDEEEIKATNPVATERFGTVAVNFQSSSTDPATGDVHAMGALPGMVWQDRDVYLQGPIWAKIPHTDGHFHPSPLMGGFGLKNPPPQILIKNTPVPANPPAEFSATKFASFITQYSTGQVSVEIEWELQKENSKRWNPEVQYTSNYAKSANVDFTVDNNGLYTEPRPIGTRYLTRPL

SEQ ID NO: 19 - DNA, 2211 bp, Adeno-associated virus 1
  source 1..2211: mol_type = genomic DNA
atggctgccgatggttatcttccagattggctcgaggacaacctctctgagggcattcgcgagtggtgggacttgaaacctggagccccgaagcccaaagccaaccagcaaaagcaggacgacggccggggtctggtgcttcctggctacaagtacctcggacccttcaacggactcgacaagggggagcccgtcaacgcggcggacgcagcggccctcgagcacgacaaggcctacgaccagcagctcaaagcgggtgacaatccgtacctgcggtataaccacgccgacgccgagtttcaggagcgtctgcaagaagatacgtcttttgggggcaacctcgggcgagcagtcttccaggccaagaagcgggttctcgaacctctcggtctggttgaggaaggcgctaagacggctcctggaaagaaacgtccggtagagcagtcgccacaagagccagactcctcctcgggcatcggcaagacaggccagcagcccgctaaaaagagactcaattttggtcagactggcgactcagagtcagtccccgatccacaacctctcggagaacctccagcaacccccgctgctgtgggacctactacaatggcttcaggcggtggcgcaccaatggcagacaataacgaaggcgccgacggagtgggtaatgcctcaggaaattggcattgcgattccacatggctgggcgacagagtcatcaccaccagcacccgcacctgggccttgcccacctacaataaccacctctacaagcaaatctccagtgcttcaacgggggccagcaacgacaaccactacttcggctacagcaccccctgggggtattttgatttcaacagattccactgccacttttcaccacgtgactggcagcgactcatcaacaacaattggggattccggcccaagagactcaacttcaaactcttcaacatccaagtcaaggaggtcacgacgaatgatggcgtcacaaccatcgctaataaccttaccagcacggttcaagtcttctcggactcggagtaccagcttccgtacgtcctcggctctgcgcaccagggctgcctccctccgttcccggcggacgtgttcatgattccgcaatacggctacctgacgctcaacaatggcagccaagccgtgggacgttcatccttttactgcctggaatatttcccttctcagatgctgagaacgggcaacaactttaccttcagctacacctttgaggaagtgcctttccacagcagctacgcgcacagccagagcctggaccggctgatgaatcctctcatcgaccaatacctgtattacctgaacagaactcaaaatcagtccggaagtgcccaaaacaaggacttgctgtttagccgtgggtctccagctggcatgtctgttcagcccaaaaactggctacctggaccctgttatcggcagcagcgcgtttctaaaacaaaaacagacaacaacaacagcaattttacctggactggtgcttcaaaatataacctcaatgggcgtgaatccatcatcaaccctggcactgctatggcctcacacaaagacgacgaagacaagttctttcccatgagcggtgtcatgatttttggaaaagagagcgccggagcttcaaacactgcattggacaatgtcatgattacagacgaagaggaaattaaagccactaaccctgtggccaccgaaagatttgggaccgtggcagtcaatttccagagcagcagcacagaccctgcgaccggagatgtgcatgctatgggagcattacctggcatggtgtggcaagatagagacgtgtacctgcagggtcccatttgggccaaaattcctcacacagatggacactttcacccgtctcctcttatgggcggctttggactcaagaacccgcctcctcagatcctcatcaaaaacacgcctgttcctgcgaatcctccggcggagttttcagctacaaagtttgcttcattcatcacccaatactccacaggacaagtgagtgtggaaattgaatgggagctgcagaaagaaaacagcaagcgctggaatcccgaagtgcagtacacatccaattatgcaaaatctgccaacgttgattttactgtggacaacaatggactttatactgagcctcgccccattggcacccgttaccttacccgtcccctgtaa

SEQ ID NO: 20 - protein, 724 aa, Adeno-associated virus 5
MSFVDHPPDWLEEVGEGLREFLGLEAGPPKPKPNQQHQDQARGLVLPGYNYLGPGNGLDRGEPVNRADEVAREHDISYNEQLEAGDNPYLKYNHADAEFQEKLADDTSFGGNLGKAVFQAKKRVLEPFGLVEEGAKTAPTGKRIDDHFPKRKKARTEEDSKPSTSSDAEAGPSGSQQLQIPAQPASSLGADTMSAGGGGPLGDNNQGADGVGNASGDWHCDSTWMGDRVVTKSTRTWVLPSYNNHQYREIKSGSVDGSNANAYFGYSTPWGYFDFNRFHSHWSPRDWQRLINNYWGFRPRSLRVKIFNIQVKEVTVQDSTTTIANNLTSTVQVFTDDDYQLPYVVGNGTEGCLPAFPPQVFTLPQYGYATLNRDNTENPTERSSFFCLEYFPSKMLRTGNNFEFTYNFEEVPFHSSFAPSQNLFKLANPLVDQYLYRFVSTNNTGGVQFNKNLAGRYANTYKNWFPGPMGRTQGWNLGSGVNRASVSAFATTNRMELEGASYQVPPQPNGMTNNLQGSNTYALENTMIFNSQPANPGTTATYLEGNMLITSESETQPVNRVAYNVGGQMATNNQSSTTAPATGTYNLQEIVPGSVWMERDVYLQGPIWAKIPETGAHFHPSPAMGGFGLKHPPPMMLIKNTPVPGNITSFSDVPVSSFITQYSTGQVTVEMEWELKKENSKRWNPEIQYTNNYNDPQFVDFAPDSTGEYRTTRPIGTRYLTRPL

SEQ ID NO: 21 - DNA, 2175 bp, Adeno-associated virus 5
  source 1..2175: mol_type = genomic DNA
atgtcttttgttgatcaccctccagattggttggaagaagttggtgaaggtcttcgcgagtttttgggccttgaagcgggcccaccgaaaccaaaacccaatcagcagcatcaagatcaagcccgtggtcttgtgctgcctggttataactatctcggacccggaaacggtctcgatcgaggagagcctgtcaacagggcagacgaggtcgcgcgagagcacgacatctcgtacaacgagcagcttgaggcgggagacaacccctacctcaagtacaaccacgcggacgccgagtttcaggagaagctcgccgacgacacatccttcgggggaaacctcggaaaggcagtctttcaggccaagaaaagggttctcgaaccttttggcctggttgaagagggtgctaagacggcccctaccggaaagcggatagacgaccactttccaaaaagaaagaaggcccggaccgaagaggactccaagccttccacctcgtcagacgccgaagctggacccagcggatcccagcagctgcaaatcccagcccaaccagcctcaagtttgggagctgatacaatgtctgcgggaggtggcggcccattgggcgacaataaccaaggtgccgatggagtgggcaatgcctcgggagattggcattgcgattccacgtggatgggggacagagtcgtcaccaagtccacccgaacctgggtgctgcccagctacaacaaccaccagtaccgagagatcaaaagcggctccgtcgacggaagcaacgccaacgcctactttggatacagcaccccctgggggtactttgactttaaccgcttccacagccactggagcccccgagactggcaaagactcatcaacaactactggggcttcagaccccggtccctcagagtcaaaatcttcaacattcaagtcaaagaggtcacggtgcaggactccaccaccaccatcgccaacaacctcacctccaccgtccaagtgtttacggacgacgactaccagctgccctacgtcgtcggcaacgggaccgagggatgcctgccggccttccctccgcaggtctttacgctgccgcagtacggttacgcgacgctgaaccgcgacaacacagaaaatcccaccgagaggagcagcttcttctgcctagagtactttcccagcaagatgctgagaacgggcaacaactttgagtttacctacaactttgaggaggtgcccttccactccagcttcgctcccagtcagaacctcttcaagctggccaacccgctggtggaccagtacttgtaccgcttcgtgagcacaaataacactggcggagtccagttcaacaagaacctggccgggagatacgccaacacctacaaaaactggttcccggggcccatgggccgaacccagggctggaacctgggctccggggtcaaccgcgccagtgtcagcgccttcgccacgaccaataggatggagctcgagggcgcgagttaccaggtgcccccgcagccgaacggcatgaccaacaacctccagggcagcaacacctatgccctggagaacactatgatcttcaacagccagccggcgaacccgggcaccaccgccacgtacctcgagggcaacatgctcatcaccagcgagagcgagacgcagccggtgaaccgcgtggcgtacaacgtcggcgggcagatggccaccaacaaccagagctccaccactgcccccgcgaccggcacgtacaacctccaggaaatcgtgcccggcagcgtgtggatggagagggacgtgtacctccaaggacccatctgggccaagatcccagagacgggggcgcactttcacccctctccggccatgggcggattcggactcaaacacccaccgcccatgatgctcatcaagaacacgcctgtgcccggaaatatcaccagcttctcggacgtgcccgtcagcagcttcatcacccagtacagcaccgggcaggtcaccgtggagatggagtgggagctcaagaaggaaaactccaagaggtggaacccagagatccagtacacaaacaactacaacgacccccagtttgtggactttgccccggacagcaccggggaatacagaaccaccagacctatcggaacccgataccttacccgacccctttaa

SEQ ID NO: 22-136 - skipped (115 entries)

SEQ ID NO: 137 - DNA, 2211 bp, synthetic construct
  source 1..2211: mol_type = other DNA
atggctgccgatggttatcttccagattggctcgaggacaaccttagtgaaggaattcgcgagtggtgggctttgaaacctggagcccctcaacccaaggcaaatcaacaacatcaagacaacgctcgaggtcttgtgcttccgggttacaaataccttggacccggcaacggactcgacaagggggagccggtcaacgcagcagacgcggcggccctcgagcacgacaaggcctacgaccagcagctcaaggccggagacaacccgtacctcaagtacaaccacgccgacgccgagttccaggagcggctcaaagaagatacgtcttttgggggcaacctcgggcgagcagtcttccaggccaaaaagaggcttcttgaacctcttggtctggttgaggaagcggctaagacggctcctggaaagaagaggcctgtagagcagtctcctcaggaaccggactcctccgcgggtattggcaaatcgggtgcacagcccgctaaaaagagactcaatttcggtcagactggcgacacagagtcagtcccagaccctcaaccaatcggagaacctcccgcagccccctcaggtgtgggatctcttacaatggcttcaggtggtggcgcaccagtggcagacaataacgaaggtgccgatggagtgggtagttcctcgggaaattggcattgcgattcccaatggctgggggacagagtcatcaccaccagcacccgaacctgggccctgcccacctacaacaatcacctctacaagcaaatctccaacagcacatctggaggatcttcaaatgacaacgcctacttcggctacagcaccccctgggggtattttgacttcaacagattccactgccacttctcaccacgtgactggcagcgactcatcaacaacaactggggattccggcctaagcgactcaacttcaagctcttcaacattcaggtcaaagaggttacggacaacaatggagtcaagaccatcgccaataaccttaccagcacggtccaggtcttcacggactcagactatcagctcccgtacgtgctcgggtcggctcacgagggctgcctcccgccgttcccagcggacgttttcatgattcctcagtacgggtatctgacgcttaatgatggaagccaggccgtgggtcgttcgtccttttactgcctggaatatttcccgtcgcaaatgctaagaacgggtaacaacttccagttcagctacgagtttgagaacgtacctttccatagcagctacgctcacagccaaagcctggaccgactaatgaatccactcatcgaccaatacttgtactatctctcaaagactattaacggttctggacagaatcaacaaacgctaaaattcagtgtggccggacccagcaacatggctgtccagggaagaaactacatacctggacccagctaccgacaacaacgtgtctcaaccactgtgactcaaaacaacaacagcgaatttgcttggcctggagcttcttcttgggctctcaatggacgtaatagcttgatgaatcctggacctgctatggccagccacaaagaaggagaggaccgtttctttcctttgtctggatctttaatttttggcaaacaaggaactggaagagacaacgtggatgcggacaaagtcatgataaccaacgaagaagaaattaaaactactaacccggtagcaacggagtcctatggacaagtggccacaaaccaccagagtgcccaagcacaggcgcagaccggctgggttcaaaaccaaggaatacttccgggtatggtttggcaggacagagatgtgtacctgcaaggacccatttgggccaaaattcctcacacggacggcaactttcacccttctccgctgatgggagggtttggaatgaagcacccgcctcctcagatcctcatcaaaaacacacctgtacctgcggatcctccaacggccttcaacaaggacaagctgaactctttcatcacccagtattctactggccaagtcagcgtggagatcgagtgggagctgcagaaggaaaacagcaagcgctggaacccggagatccagtacacttccaactattacaagtctaataatgttgaatttgctgttaatactgaaggtgtatatagtgaaccccgccccattggcaccagatacctgactcgtaatctgtaa

SEQ ID NO: 138 - protein, 736 aa, synthetic construct
MAADGYLPDWLEDNLSEGIREWWALKPGAPQPKANQQHQDNARGLVLPGYKYLGPGNGLDKGEPVNAADAAALEHDKAYDQQLKAGDNPYLKYNHADAEFQERLKEDTSFGGNLGRAVFQAKKRLLEPLGLVEEAAKTAPGKKRPVEQSPQEPDSSAGIGKSGAQPAKKRLNFGQTGDTESVPDPQPIGEPPAAPSGVGSLTMASGGGAPVADNNEGADGVGSSSGNWHCDSQWLGDRVITTSTRTWALPTYNNHLYKQISNSTSGGSSNDNAYFGYSTPWGYFDFNRFHCHFSPRDWQRLINNNWGFRPKRLNFKLFNIQVKEVTDNNGVKTIANNLTSTVQVFTDSDYQLPYVLGSAHEGCLPPFPADVFMIPQYGYLTLNDGSQAVGRSSFYCLEYFPSQMLRTGNNFQFSYEFENVPFHSSYAHSQSLDRLMNPLIDQYLYYLSKTINGSGQNQQTLKFSVAGPSNMAVQGRNYIPGPSYRQQRVSTTVTQNNNSEFAWPGASSWALNGRNSLMNPGPAMASHKEGEDRFFPLSGSLIFGKQGTGRDNVDADKVMITNEEEIKTTNPVATESYGQVATNHQSAQAQAQTGWVQNQGILPGMVWQDRDVYLQGPIWAKIPHTDGNFHPSPLMGGFGMKHPPPQILIKNTPVPADPPTAFNKDKLNSFITQYSTGQVSVEIEWELQKENSKRWNPEIQYTSNYYKSNNVEFAVNTEGVYSEPRPIGTRYLTRNL

SEQ ID NO: 139-1194 - skipped (1056 entries)

SEQ ID NO: 1195 - protein, 20 aa, synthetic construct
VATNHQSAQAQAQTGWVQNQ

SEQ ID NO: 1196 - protein, 12 aa, synthetic construct
TNHQSAQAQAQT

SEQ ID NO: 1197 - protein, 7 aa, synthetic construct
AQAQAQT

SEQ ID NO: 1198 - protein, 13 aa, synthetic construct
ATNHQSAQAQAQT

SEQ ID NO: 1199-1261 - skipped (63 entries)

SEQ ID NO: 1262 - protein, 7 aa, synthetic construct
TLAVPFK

SEQ ID NO: 1263-1846 - skipped (584 entries)

SEQ ID NO: 1847 - DNA, 22 bp, synthetic construct
  source 1..22: mol_type = other DNA
agtgaattctaccagtgccata

SEQ ID NO: 1848-1864 - skipped (17 entries)

SEQ ID NO: 1865 - DNA, 23 bp, synthetic construct
  source 1..23: mol_type = other DNA
acaaacaccattgtcacactcca

SEQ ID NO: 1866 - DNA, 71 bp, synthetic construct
  source 1..71: mol_type = other DNA
acaaacaccattgtcacactccacacaaacaccattgtcacactccacacaaacaccattgtcacactcca

SEQ ID NO: 1867 - DNA, 24 bp, synthetic construct
  source 1..24: mol_type = other DNA
agtgtgagttctaccattgccaaa

SEQ ID NO: 1868 - DNA, 23 bp, synthetic construct
  source 1..23: mol_type = other DNA
agcaaaaatgtgctagtgccaaa

SEQ ID NO: 1869 - DNA, 23 bp, synthetic construct
  source 1..23: mol_type = other DNA
tccataaagtaggaaacactaca

SEQ ID NO: 1870-1873 - skipped (4 entries)

SEQ ID NO: 1874 - DNA, 1184 bp, synthetic construct
  source 1..1184: mol_type = other DNA
cgtgaggctccggtgcccgtcagtgggcagagcgcacatcgcccacagtccccgagaagttggggggaggggtcggcaattgaaccggtgcctagagaaggtggcgcggggtaaactgggaaagtgatgtcgtgtactggctccgcctttttcccgagggtgggggagaaccgtatataagtgcagtagtcgccgtgaacgttctttttcgcaacgggtttgccgccagaacacaggtaagtgccgtgtgtggttcccgcgggcctggcctctttacgggttatggcccttgcgtgccttgaattacttccacctggctgcagtacgtgattcttgatcccgagcttcgggttggaagtgggtgggagagttcgaggccttgcgcttaaggagccccttcgcctcgtgcttgagttgaggcctggcctgggcgctggggccgccgcgtgcgaatctggtggcaccttcgcgcctgtctcgctgctttcgataagtctctagccatttaaaatttttgatgacctgctgcgacgctttttttctggcaagatagtcttgtaaatgcgggccaagatctgcacactggtatttcggtttttggggccgcgggcggcgacggggcccgtgcgtcccagcgcacatgttcggcgaggcggggcctgcgagcgcggccaccgagaatcggacgggggtagtctcaagctggccggcctgctctggtgcctggcctcgcgccgccgtgtatcgccccgccctgggcggcaaggctggcccggtcggcaccagttgcgtgagcggaaagatggccgcttcccggccctgctgcagggagctcaaaatggaggacgcggcgctcgggagagcgggcgggtgagtcacccacacaaaggaaaagggcctttccgtcctcagccgtcgcttcatgtgactccacggagtaccgggcgccgtccaggcacctcgattagttctcgagcttttggagtacgtcgtctttaggttggggggaggggttttatgcgatggagtttccccacactgagtgggtggagactgaagttaggccagcttggcacttgatgtaattctccttggaatttgccctttttgagtttggatcttggttcattctcaagcctcagacagtggttcaaagtttttttcttccatttcaggtgtcgtga

SEQ ID NO: 1875 - DNA, 227 bp, synthetic construct
  source 1..227: mol_type = other DNA
gcccgtcagtgggcagagcgcacatcgcccacagtccccgagaagttggggggaggggtcggcaattgaaccggtgcctagagaaggtggcgcggggtaaactgggaaagtgatgtcgtgtactggctccgcctttttcccgagggtgggggagaaccgtatataagtgcagtagtcgccgtgaacgttctttttcgcaacgggtttgccgccagaacacgcgtaag

SEQ ID NO: 1876 - DNA, 16 bp, synthetic construct
  source 1..16: mol_type = other DNA
ggtggagaagagcatg

SEQ ID NO: 1877 - DNA, 27 bp, synthetic construct
  source 1..27: mol_type = other DNA
gtcatcactgaggtggagaagagcatg

SEQ ID NO: 1878 - DNA, 222 bp, synthetic construct
  source 1..222: mol_type = other DNA
gcccgtcagtgggcagagcgcacatcgcccacagtccccgagaagttggggggaggggtcggcaattgaaccggtgcctagagaaggtggcgcggggtaaactgggaaagtgatgtcgtgtactggctccgcctttttcccgagggtgggggagaaccgtatataagtgcagtagtcgccgtgaacgttctttttcgcaacgggtttgccgccagaacacag

SEQ ID NO: 1879 - DNA, 222 bp, synthetic construct
  source 1..222: mol_type = other DNA
gcccgtcagtgggcagagcgcacatcgcccacagtccccgagaagttggggggaggggtcggcaattgaaccggtgcctagagaaggtggcgcggggtaaactgggaaagtgatgtcgtgtactggctccgcctttttcccgagggtgggggagaaccgtatataagtgcagtagtcgccgtgaacgttctttttcgcaacgggtttgccgccagaacacgc

SEQ ID NO: 1880 - DNA, 229 bp, synthetic construct
  source 1..229: mol_type = other DNA
gtgcccgtcagtgggcagagcgcacatcgcccacagtccccgagaagttggggggaggggtcggcaattgaaccggtgcctagagaaggtggcgcggggtaaactgggaaagtgatgtcgtgtactggctccgcctttttcccgagggtgggggagaaccgtatataagtgcagtagtcgccgtgaacgttctttttcgcaacgggtttgccgccagaacacgcgtaag

SEQ ID NO: 1881 - DNA, 235 bp, synthetic construct
  source 1..235: mol_type = other DNA
gctccggtgcccgtcagtgggcagagcgcacatcgcccacagtccccgagaagttggggggaggggtcggcaattgaaccggtgcctagagaaggtggcgcggggtaaactgggaaagtgatgtcgtgtactggctccgcctttttcccgagggtgggggagaaccgtatataagtgcagtagtcgccgtgaacgttctttttcgcaacgggtttgccgccagaacacgcgtaag

SEQ ID NO: 1882 - DNA, 241 bp, synthetic construct
  source 1..241: mol_type = other DNA
cgtgaggctccggtgcccgtcagtgggcagagcgcacatcgcccacagtccccgagaagttggggggaggggtcggcaattgaaccggtgcctagagaaggtggcgcggggtaaactgggaaagtgatgtcgtgtactggctccgcctttttcccgagggtgggggagaaccgtatataagtgcagtagtcgccgtgaacgttctttttcgcaacgggtttgccgccagaacacgcgtaag

SEQ ID NO: 1883 - DNA, 236 bp, synthetic construct
  source 1..236: mol_type = other DNA
cgtgaggctccggtgcccgtcagtgggcagagcgcacatcgcccacagtccccgagaagttggggggaggggtcggcaattgaaccggtgcctagagaaggtggcgcggggtaaactgggaaagtgatgtcgtgtactggctccgcctttttcccgagggtgggggagaaccgtatataagtgcagtagtcgccgtgaacgttctttttcgcaacgggtttgccgccagaacacag

SEQ ID NO: 1884 - DNA, 246 bp, synthetic construct
  source 1..246: mol_type = other DNA
gcatgcgtgaggctccggtgcccgtcagtgggcagagcgcacatcgcccacagtccccgagaagttggggggaggggtcggcaattgaaccggtgcctagagaaggtggcgcggggtaaactgggaaagtgatgtcgtgtactggctccgcctttttcccgagggtgggggagaaccgtatataagtgcagtagtcgccgtgaacgttctttttcgcaacgggtttgccgccagaacacgcgtaag

SEQ ID NO: 1885 - DNA, 241 bp, synthetic construct
  source 1..241: mol_type = other DNA
gcatgcgtgaggctccggtgcccgtcagtgggcagagcgcacatcgcccacagtccccgagaagttggggggaggggtcggcaattgaaccggtgcctagagaaggtggcgcggggtaaactgggaaagtgatgtcgtgtactggctccgcctttttcccgagggtgggggagaaccgtatataagtgcagtagtcgccgtgaacgttctttttcgcaacgggtttgccgccagaacacag

SEQ ID NO: 1886 - DNA, 257 bp, synthetic construct
  source 1..257: mol_type = other DNA
ggtggagaagagcatgcgtgaggctccggtgcccgtcagtgggcagagcgcacatcgcccacagtccccgagaagttggggggaggggtcggcaattgaaccggtgcctagagaaggtggcgcggggtaaactgggaaagtgatgtcgtgtactggctccgcctttttcccgagggtgggggagaaccgtatataagtgcagtagtcgccgtgaacgttctttttcgcaacgggtttgccgccagaacacgcgtaag

SEQ ID NO: 1887 - DNA, 252 bp, synthetic construct
  source 1..252: mol_type = other DNA
ggtggagaagagcatgcgtgaggctccggtgcccgtcagtgggcagagcgcacatcgcccacagtccccgagaagttggggggaggggtcggcaattgaaccggtgcctagagaaggtggcgcggggtaaactgggaaagtgatgtcgtgtactggctccgcctttttcccgagggtgggggagaaccgtatataagtgcagtagtcgccgtgaacgttctttttcgcaacgggtttgccgccagaacacag

SEQ ID NO: 1888 - DNA, 268 bp, synthetic construct
  source 1..268: mol_type = other DNA
gtcatcactgaggtggagaagagcatgcgtgaggctccggtgcccgtcagtgggcagagcgcacatcgcccacagtccccgagaagttggggggaggggtcggcaattgaaccggtgcctagagaaggtggcgcggggtaaactgggaaagtgatgtcgtgtactggctccgcctttttcccgagggtgggggagaaccgtatataagtgcagtagtcgccgtgaacgttctttttcgcaacgggtttgccgccagaacacgcgtaag

SEQ ID NO: 1889 - DNA, 263 bp, synthetic construct
  source 1..263: mol_type = other DNA
gtcatcactgaggtggagaagagcatgcgtgaggctccggtgcccgtcagtgggcagagcgcacatcgcccacagtccccgagaagttggggggaggggtcggcaattgaaccggtgcctagagaaggtggcgcggggtaaactgggaaagtgatgtcgtgtactggctccgcctttttcccgagggtgggggagaaccgtatataagtgcagtagtcgccgtgaacgttctttttcgcaacgggtttgccgccagaacacag

SEQ ID NO: 1890-3622 - skipped (1733 entries)

SEQ ID NO: 3623 - DNA, 2232 bp, synthetic construct
  source 1..2232: mol_type = other DNA
atggctgccgatggttatcttccagattggctcgaggacaaccttagtgaaggaattcgcgagtggtgggctttgaaacctggagcccctcaacccaaggcaaatcaacaacatcaagacaacgctcgaggtcttgtgcttccgggttacaaataccttggacccggcaacggactcgacaagggggagccggtcaacgcagcagacgcggcggccctcgagcacgacaaggcctacgaccagcagctcaaggccggagacaacccgtacctcaagtacaaccacgccgacgccgagttccaggagcggctcaaagaagatacgtcttttgggggcaacctcgggcgagcagtcttccaggccaaaaagaggcttcttgaacctcttggtctggttgaggaagcggctaagacggctcctggaaagaagaggcctgtagagcagtctcctcaggaaccggactcctccgcgggtattggcaaatcgggtgcacagcccgctaaaaagagactcaatttcggtcagactggcgacacagagtcagtcccagaccctcaaccaatcggagaacctcccgcagccccctcaggtgtgggatctcttacaatggcttcaggtggtggcgcaccagtggcagacaataacgaaggtgccgatggagtgggtagttcctcgggaaattggcattgcgattcccaatggctgggggacagagtcatcaccaccagcacccgaacctgggccctgcccacctacaacaatcacctctacaagcaaatctccaacagcacatctggaggatcttcaaatgacaacgcctacttcggctacagcaccccctgggggtattttgacttcaacagattccactgccacttctcaccacgtgactggcagcgactcatcaacaacaactggggattccggcctaagcgactcaacttcaagctcttcaacattcaggtcaaagaggttacggacaacaatggagtcaagaccatcgccaataaccttaccagcacggtccaggtcttcacggactcagactatcagctcccgtacgtgctcgggtcggctcacgagggctgcctcccgccgttcccagcggacgttttcatgattcctcagtacgggtatctgacgcttaatgatggaagccaggccgtgggtcgttcgtccttttactgcctggaatatttcccgtcgcaaatgctaagaacgggtaacaacttccagttcagctacgagtttgagaacgtacctttccatagcagctacgctcacagccaaagcctggaccgactaatgaatccactcatcgaccaatacttgtactatctctcaaagactattaacggttctggacagaatcaacaaacgctaaaattcagtgtggccggacccagcaacatggctgtccagggaagaaactacatacctggacccagctaccgacaacaacgtgtctcaaccactgtgactcaaaacaacaacagcgaatttgcttggcctggagcttcttcttgggctctcaatggacgtaatagcttgatgaatcctggacctgctatggccagccacaaagaaggagaggaccgtttctttcctttgtctggatctttaatttttggcaaacaaggaactggaagagacaacgtggatgcggacaaagtcatgataaccaacgaagaagaaattaaaactactaacccggtagcaacggagtcctatggacaagtggccacaaaccaccagagtccgcttaatggtgccgtccatctttatgctcaggcgcagaccggctgggttcaaaaccaaggaatacttccgggtatggtttggcaggacagagatgtgtacctgcaaggacccatttgggccaaaattcctcacacggacggcaactttcacccttctccgctgatgggagggtttggaatgaagcacccgcctcctcagatcctcatcaaaaacacacctgtacctgccgatcctccaacggccttcaacaaggacaagctgaactctttcatcacccagtattctactggccaagtcagcgtggagatcgagtgggagctgcagaaggaaaacagcaagcggtggaacccggagatccagtacacttccaactattacaagtctaataatgttgaatttgctgttaatactgaaggtgtatatagtgaaccccgccccattggcaccagatacctgactcgtaatctgtaa

SEQ ID NO: 3624-3635 - skipped (12 entries)

SEQ ID NO: 3636 - protein, 743 aa, synthetic construct
MAADGYLPDWLEDNLSEGIREWWALKPGAPQPKANQQHQDNARGLVLPGYKYLGPGNGLDKGEPVNAADAAALEHDKAYDQQLKAGDNPYLKYNHADAEFQERLKEDTSFGGNLGRAVFQAKKRLLEPLGLVEEAAKTAPGKKRPVEQSPQEPDSSAGIGKSGAQPAKKRLNFGQTGDTESVPDPQPIGEPPAAPSGVGSLTMASGGGAPVADNNEGADGVGSSSGNWHCDSQWLGDRVITTSTRTWALPTYNNHLYKQISNSTSGGSSNDNAYFGYSTPWGYFDFNRFHCHFSPRDWQRLINNNWGFRPKRLNFKLFNIQVKEVTDNNGVKTIANNLTSTVQVFTDSDYQLPYVLGSAHEGCLPPFPADVFMIPQYGYLTLNDGSQAVGRSSFYCLEYFPSQMLRTGNNFQFSYEFENVPFHSSYAHSQSLDRLMNPLIDQYLYYLSKTINGSGQNQQTLKFSVAGPSNMAVQGRNYIPGPSYRQQRVSTTVTQNNNSEFAWPGASSWALNGRNSLMNPGPAMASHKEGEDRFFPLSGSLIFGKQGTGRDNVDADKVMITNEEEIKTTNPVATESYGQVATNHQSPLNGAVHLYAQAQTGWVQNQGILPGMVWQDRDVYLQGPIWAKIPHTDGNFHPSPLMGGFGMKHPPPQILIKNTPVPADPPTAFNKDKLNSFITQYSTGQVSVEIEWELQKENSKRWNPEIQYTSNYYKSNNVEFAVNTEGVYSEPRPIGTRYLTRNL

SEQ ID NO: 3637-3647 - skipped (11 entries)

SEQ ID NO: 3648 - protein, 9 aa, synthetic construct
PLNGAVHLY

SEQ ID NO: 3649-3659 - skipped (11 entries)

SEQ ID NO: 3660 - DNA, 27 bp, synthetic construct
  source 1..27: mol_type = other DNA
ccgcttaatggtgccgtccatctttat

SEQ ID NO: 3661-3677 - skipped (17 entries)

SEQ ID NO: 3678 - protein, 4 aa, synthetic construct
PLNG

SEQ ID NO: 3679 - protein, 5 aa, synthetic construct
PLNGA

SEQ ID NO: 3680 - protein, 6 aa, synthetic construct
PLNGAV

SEQ ID NO: 3681 - protein, 7 aa, synthetic construct
PLNGAVH

SEQ ID NO: 3682 - protein, 8 aa, synthetic construct
PLNGAVHL

SEQ ID NO: 3683 - protein, 4 aa, synthetic construct
NGAV

SEQ ID NO: 3684 - protein, 4 aa, synthetic construct
GAVH

SEQ ID NO: 3685 - protein, 5 aa, synthetic construct
NGAVH

SEQ ID NO: 3686 - protein, 5 aa, synthetic construct
GAVHL

SEQ ID NO: 3687 - protein, 5 aa, synthetic construct
AVHLY

SEQ ID NO: 3688 - protein, 6 aa, synthetic construct
NGAVHL

SEQ ID NO: 3689 - protein, 7 aa, synthetic construct
NGAVHLY

SEQ ID NO: 3690-3935 - skipped (246 entries)

SEQ ID NO: 3936 - protein, 758 aa, Homo sapiens
MAEPRQEFEVMEDHAGTYGLGDRKDQGGYTMHQDQEGDTDAGLKESPLQTPTEDGSEEPGSETSDAKSTPTAEDVTAPLVDEGAPGKQAAAQPHTEIPEGTTAEEAGIGDTPSLEDEAAGHVTQEPESGKVVQEGFLREPGPPGLSHQLMSGMPGAPLLPEGPREATRQPSGTGPEDTEGGRHAPELLKHQLLGDLHQEGPPLKGAGGKERPGSKEEVDEDRDVDESSPQDSPPSKASPAQDGRPPQTAAREATSIPGFPAEGAIPLPVDFLSKVSTEIPASEPDGPSVGRAKGQDAPLEFTFHVEITPNVQKEQAHSEEHLGRAAFPGAPGEGPEARGPSLGEDTKEADLPEPSEKQPAAAPRGKPVSRVPQLKARMVSKSKDGTGSDDKKAKTSTRSSAKTLKNRPCLSPKHPTPGSSDPLIQPSSPAVCPEPPSSPKYVSSVTSRTGSSGAKEMKLKGADGKTKIATPRGAAPPGQKGQANATRIPAKTPPAPKTPPSSGEPPKSGDRSGYSSPGSPGTPGSRSRTPSLPTPPTREPKKVAVVRTPPKSPSSAKSRLQTAPVPMPDLKNVKSKIGSTENLKHQPGGGKVQIINKKLDLSNVQSKCGSKDNIKHVPGGGSVQIVYKPVDLSKVTSKCGSLGNIHHKPGGGQVEVKSEKLDFKDRVQSKIGSLDNITHVPGGGNKKIETHKLTFRENAKAKTDHGAEIVYKSPVVSGDTSPRHLSNVSSTGSIDMVDSPQLATLADEVSASLAKQGL

SEQ ID NO: 3937 - protein, 441 aa, Homo sapiens
MAEPRQEFEVMEDHAGTYGLGDRKDQGGYTMHQDQEGDTDAGLKESPLQTPTEDGSEEPGSETSDAKSTPTAEDVTAPLVDEGAPGKQAAAQPHTEIPEGTTAEEAGIGDTPSLEDEAAGHVTQARMVSKSKDGTGSDDKKAKGADGKTKIATPRGAAPPGQKGQANATRIPAKTPPAPKTPPSSGEPPKSGDRSGYSSPGSPGTPGSRSRTPSLPTPPTREPKKVAVVRTPPKSPSSAKSRLQTAPVPMPDLKNVKSKIGSTENLKHQPGGGKVQIINKKLDLSNVQSKCGSKDNIKHVPGGGSVQIVYKPVDLSKVTSKCGSLGNIHHKPGGGQVEVKSEKLDFKDRVQSKIGSLDNITHVPGGGNKKIETHKLTFRENAKAKTDHGAEIVYKSPVVSGDTSPRHLSNVSSTGSIDMVDSPQLATLADEVSASLAKQGL

SEQ ID NO: 3938 - protein, 383 aa, Homo sapiens
MAEPRQEFEVMEDHAGTYGLGDRKDQGGYTMHQDQEGDTDAGLKAEEAGIGDTPSLEDEAAGHVTQARMVSKSKDGTGSDDKKAKGADGKTKIATPRGAAPPGQKGQANATRIPAKTPPAPKTPPSSGEPPKSGDRSGYSSPGSPGTPGSRSRTPSLPTPPTREPKKVAVVRTPPKSPSSAKSRLQTAPVPMPDLKNVKSKIGSTENLKHQPGGGKVQIINKKLDLSNVQSKCGSKDNIKHVPGGGSVQIVYKPVDLSKVTSKCGSLGNIHHKPGGGQVEVKSEKLDFKDRVQSKIGSLDNITHVPGGGNKKIETHKLTFRENAKAKTDHGAEIVYKSPVVSGDTSPRHLSNVSSTGSIDMVDSPQLATLADEVSASLAKQGL

SEQ ID NO: 3939 - protein, 352 aa, Homo sapiens
MAEPRQEFEVMEDHAGTYGLGDRKDQGGYTMHQDQEGDTDAGLKAEEAGIGDTPSLEDEAAGHVTQARMVSKSKDGTGSDDKKAKGADGKTKIATPRGAAPPGQKGQANATRIPAKTPPAPKTPPSSGEPPKSGDRSGYSSPGSPGTPGSRSRTPSLPTPPTREPKKVAVVRTPPKSPSSAKSRLQTAPVPMPDLKNVKSKIGSTENLKHQPGGGKVQIVYKPVDLSKVTSKCGSLGNIHHKPGGGQVEVKSEKLDFKDRVQSKIGSLDNITHVPGGGNKKIETHKLTFRENAKAKTDHGAEIVYKSPVVSGDTSPRHLSNVSSTGSIDMVDSPQLATLADEVSASLAKQGL

SEQ ID NO: 3940 - protein, 412 aa, Homo sapiens
MAEPRQEFEVMEDHAGTYGLGDRKDQGGYTMHQDQEGDTDAGLKESPLQTPTEDGSEEPGSETSDAKSTPTAEAEEAGIGDTPSLEDEAAGHVTQARMVSKSKDGTGSDDKKAKGADGKTKIATPRGAAPPGQKGQANATRIPAKTPPAPKTPPSSGEPPKSGDRSGYSSPGSPGTPGSRSRTPSLPTPPTREPKKVAVVRTPPKSPSSAKSRLQTAPVPMPDLKNVKSKIGSTENLKHQPGGGKVQIINKKLDLSNVQSKCGSKDNIKHVPGGGSVQIVYKPVDLSKVTSKCGSLGNIHHKPGGGQVEVKSEKLDFKDRVQSKIGSLDNITHVPGGGNKKIETHKLTFRENAKAKTDHGAEIVYKSPVVSGDTSPRHLSNVSSTGSIDMVDSPQLATLADEVSASLAKQGL

SEQ ID NO: 3941 - protein, 776 aa, Homo sapiens
MAEPRQEFEVMEDHAGTYGLGDRKDQGGYTMHQDQEGDTDAGLKESPLQTPTEDGSEEPGSETSDAKSTPTAEDVTAPLVDEGAPGKQAAAQPHTEIPEGTTAEEAGIGDTPSLEDEAAGHVTQEPESGKVVQEGFLREPGPPGLSHQLMSGMPGAPLLPEGPREATRQPSGTGPEDTEGGRHAPELLKHQLLGDLHQEGPPLKGAGGKERPGSKEEVDEDRDVDESSPQDSPPSKASPAQDGRPPQTAAREATSIPGFPAEGAIPLPVDFLSKVSTEIPASEPDGPSVGRAKGQDAPLEFTFHVEITPNVQKEQAHSEEHLGRAAFPGAPGEGPEARGPSLGEDTKEADLPEPSEKQPAAAPRGKPVSRVPQLKARMVSKSKDGTGSDDKKAKTSTRSSAKTLKNRPCLSPKHPTPGSSDPLIQPSSPAVCPEPPSSPKYVSSVTSRTGSSGAKEMKLKGADGKTKIATPRGAAPPGQKGQANATRIPAKTPPAPKTPPSSATKQVQRRPPPAGPRSERGEPPKSGDRSGYSSPGSPGTPGSRSRTPSLPTPPTREPKKVAVVRTPPKSPSSAKSRLQTAPVPMPDLKNVKSKIGSTENLKHQPGGGKVQIINKKLDLSNVQSKCGSKDNIKHVPGGGSVQIVYKPVDLSKVTSKCGSLGNIHHKPGGGQVEVKSEKLDFKDRVQSKIGSLDNITHVPGGGNKKIETHKLTFRENAKAKTDHGAEIVYKSPVVSGDTSPRHLSNVSSTGSIDMVDSPQLATLADEVSASLAKQGL

SEQ ID NO: 3942 - protein, 381 aa, Homo sapiens
MAEPRQEFEVMEDHAGTYGLGDRKDQGGYTMHQDQEGDTDAGLKESPLQTPTEDGSEEPGSETSDAKSTPTAEAEEAGIGDTPSLEDEAAGHVTQARMVSKSKDGTGSDDKKAKGADGKTKIATPRGAAPPGQKGQANATRIPAKTPPAPKTPPSSGEPPKSGDRSGYSSPGSPGTPGSRSRTPSLPTPPTREPKKVAVVRTPPKSPSSAKSRLQTAPVPMPDLKNVKSKIGSTENLKHQPGGGKVQIVYKPVDLSKVTSKCGSLGNIHHKPGGGQVEVKSEKLDFKDRVQSKIGSLDNITHVPGGGNKKIETHKLTFRENAKAKTDHGAEIVYKSPVVSGDTSPRHLSNVSSTGSIDMVDSPQLATLADEVSASLAKQGL

SEQ ID NO: 3943 - protein, 410 aa, Homo sapiens
MAEPRQEFEVMEDHAGTYGLGDRKDQGGYTMHQDQEGDTDAGLKESPLQTPTEDGSEEPGSETSDAKSTPTAEDVTAPLVDEGAPGKQAAAQPHTEIPEGTTAEEAGIGDTPSLEDEAAGHVTQARMVSKSKDGTGSDDKKAKGADGKTKIATPRGAAPPGQKGQANATRIPAKTPPAPKTPPSSGEPPKSGDRSGYSSPGSPGTPGSRSRTPSLPTPPTREPKKVAVVRTPPKSPSSAKSRLQTAPVPMPDLKNVKSKIGSTENLKHQPGGGKVQIVYKPVDLSKVTSKCGSLGNIHHKPGGGQVEVKSEKLDFKDRVQSKIGSLDNITHVPGGGNKKIETHKLTFRENAKAKTDHGAEIVYKSPVVSGDTSPRHLSNVSSTGSIDMVDSPQLATLADEVSASLAKQGL

SEQ ID NO: 3944 - DNA, 6762 bp, Homo sapiens
  source 1..6762: mol_type = genomic DNA
ggacggccgagcggcagggcgctcgcgcgcgcccactagtggccggaggagaaggctcccgcggaggccgcgctgcccgccccctcccctggggaggctcgcgttcccgctgctcgcgcctgcgccgcccgccggcctcaggaacgcgccctcttcgccggcgcgcgccctcgcagtcaccgccacccaccagctccggcaccaacagcagcgccgctgccaccgcccaccttctgccgccgccaccacagccaccttctcctcctccgctgtcctctcccgtcctcgcctctgtcgactatcaggtgaactttgaaccaggatggctgagccccgccaggagttcgaagtgatggaagatcacgctgggacgtacgggttgggggacaggaaagatcaggggggctacaccatgcaccaagaccaagagggtgacacggacgctggcctgaaagaatctcccctgcagacccccactgaggacggatctgaggaaccgggctctgaaacctctgatgctaagagcactccaacagcggaagatgtgacagcacccttagtggatgagggagctcccggcaagcaggctgccgcgcagccccacacggagatcccagaaggaaccacagctgaagaagcaggcattggagacacccccagcctggaagacgaagctgctggtcacgtgacccaagagcctgaaagtggtaaggtggtccaggaaggcttcctccgagagccaggccccccaggtctgagccaccagctcatgtccggcatgcctggggctcccctcctgcctgagggccccagagaggccacacgccaaccttcggggacaggacctgaggacacagagggcggccgccacgcccctgagctgctcaagcaccagcttctaggagacctgcaccaggaggggccgccgctgaagggggcagggggcaaagagaggccggggagcaaggaggaggtggatgaagaccgcgacgtcgatgagtcctccccccaagactcccctccctccaaggcctccccagcccaagatgggcggcctccccagacagccgccagagaagccaccagcatcccaggcttcccagcggagggtgccatccccctccctgtggatttcctctccaaagtttccacagagatcccagcctcagagcccgacgggcccagtgtagggcgggccaaagggcaggatgcccccctggagttcacgtttcacgtggaaatcacacccaacgtgcagaaggagcaggcgcactcggaggagcatttgggaagggctgcatttccaggggcccctggagaggggccagaggcccggggcccctctttgggagaggacacaaaagaggctgaccttccagagccctctgaaaagcagcctgctgctgctccgcgggggaagcccgtcagccgggtccctcaactcaaagctcgcatggtcagtaaaagcaaagacgggactggaagcgatgacaaaaaagccaagacatccacacgttcctctgctaaaaccttgaaaaataggccttgccttagccccaaacaccccactcctggtagctcagaccctctgatccaaccctccagccctgctgtgtgcccagagccaccttcctctcctaaatacgtctcttctgtcacttcccgaactggcagttctggagcaaaggagatgaaactcaagggggctgatggtaaaacgaagatcgccacaccgcggggagcagcccctccaggccagaagggccaggccaacgccaccaggattccagcaaaaaccccgcccgctccaaagacaccacccagctctggtgaacctccaaaatcaggggatcgcagcggctacagcagccccggctccccaggcactcccggcagccgctcccgcaccccgtcccttccaaccccacccacccgggagcccaagaaggtggcagtggtccgtactccacccaagtcgccgtcttccgccaagagccgcctgcagacagcccccgtgcccatgccagacctgaagaatgtcaagtccaagatcggctccactgagaacctgaagcaccagccgggaggcgggaaggtgcagataattaataagaagctggatcttagcaacgtccagtccaagtgtggctcaaaggataatatcaaacacgtcccgggaggcggcagtgtgcaaatagtctacaaaccagttgacctgagcaaggtgacctccaagtgtggctcattaggcaacatccatcataaaccaggaggtggccaggtggaagtaaaatctgagaagcttgacttcaaggacagagtccagtcgaagattgggtccctggacaatatcacccacgtccctggcggaggaaataaaaagattgaaacccacaagctgaccttccgcgagaacgccaaagccaagacagaccacggggcggagatcgtgtacaagtcgccagtggtgtctggggacacgtctccacggcatctcagcaatgtctcctccaccggcagcatcgacatggtagactcgccccagctcgccacgctagctgacgaggtgtctgcctccctggccaagcagggtttgtgatcaggcccctggggcggtcaataattgtggagaggagagaatgagagagtgtggaaaaaaaaagaataatgacccggcccccgccctctgcccccagctgctcctcgcagttcggttaattggttaatcacttaacctgcttttgtcactcggctttggctcgggacttcaaaatcagtgatgggagtaagagcaaatttcatctttccaaattgatgggtgggctagtaataaaatatttaaaaaaaaacattcaaaaacatggccacatccaacatttcctcaggcaattccttttgattcttttttcttccccctccatgtagaagagggagaaggagaggctctgaaagctgcttctgggggatttcaagggactgggggtgccaaccacctctggccctgttgtgggggtgtcacagaggcagtggcagcaacaaaggatttgaaacttggtgtgttcgtggagccacaggcagacgatgtcaaccttgtgtgagtgtgacgggggttggggtggggcgggaggccacgggggaggccgaggcaggggctgggcagaggggagaggaagcacaagaagtgggagtgggagaggaagccacgtgctggagagtagacatccccctccttgccgctgggagagccaaggcctatgccacctgcagcgtctgagcggccgcctgtccttggtggccgggggtgggggcctgctgtgggtcagtgtgccaccctctgcagggcagcctgtgggagaagggacagcgggtaaaaagagaaggcaagctggcaggagggtggcacttcgtggatgacctccttagaaaagactgaccttgatgtcttgagagcgctggcctcttcctccctccctgcagggtagggggcctgagttgaggggcttccctctgctccacagaaaccctgttttattgagttctgaaggttggaactgctgccatgattttggccactttgcagacctgggactttagggctaaccagttctctttgtaaggacttgtgcctcttgggagacgtccacccgtttccaagcctgggccactggcatctctggagtgtgtgggggtctgggaggcaggtcccgagccccctgtccttcccacggccactgcagtcaccccgtctgcgccgctgtgctgttgtctgccgtgagagcccaatcactgcctatacccctcatcacacgtcacaatgtcccgaattcccagcctcaccaccccttctcagtaatgaccctggttggttgcaggaggtacctactccatactgagggtgaaattaagggaaggcaaagtccaggcacaagagtgggaccccagcctctcactctcagttccactcatccaactgggaccctcaccacgaatctcatgatctgattcggttccctgtctcctcctcccgtcacagatgtgagccagggcactgctcagctgtgaccctaggtgtttctgccttgttgacatggagagagccctttcccctgagaaggcctggccccttcctgtgctgagcccacagcagcaggctgggtgtcttggttgtcagtggtggcaccaggatggaagggcaaggcacccagggcaggcccacagtcccgctgtcccccacttgcaccctagcttgtagctgccaacctcccagacagcccagcccgctgctcagctccacatgcatagtatcagccctccacacccgacaaaggggaacacacccccttggaaatggttcttttcccccagtcccagctggaagccatgctgtctgttctgctggagcagctgaacatatacatagatgttgccctgccctccccatctgcaccctgttgagttgtagttggatttgtctgtttatgcttggattcaccagagtgactatgatagtgaaaagaaaaaaaaaaaaaaaaaaggacgcatgtatcttgaaatgcttgtaaagaggtttctaacccaccctcacgaggtgtctctcacccccacactgggactcgtgtggcctgtgtggtgccaccctgctggggcctcccaagttttgaaaggctttcctcagcacctgggacccaacagagaccagcttctagcagctaaggaggccgttcagctgtgacgaaggcctgaagcacaggattaggactgaagcgatgatgtccccttccctacttccccttggggctccctgtgtcagggcacagactaggtcttgtggctggtctggcttgcggcgcgaggatggttctctctggtcatagcccgaagtctcatggcagtcccaaaggaggcttacaactcctgcatcacaagaaaaaggaagccactgccagctggggggatctgcagctcccagaagctccgtgagcctcagccacccctcagactgggttcctctccaagctcgccctctggaggggcagcgcagcctcccaccaagggccctgcgaccacagcagggattgggatgaattgcctgtcctggatctgctctagaggcccaagctgcctgcctgaggaaggatgacttgacaagtcaggagacactgttcccaaagccttgaccagagcacctcagcccgctgaccttgcacaaactccatctgctgccatgagaaaagggaagccgcctttgcaaaacattgctgcctaaagaaactcagcagcctcaggcccaattctgccacttctggtttgggtacagttaaaggcaaccctgagggacttggcagtagaaatccagggcctcccctggggctggcagcttcgtgtgcagctagagctttacctgaaaggaagtctctgggcccagaactctccaccaagagcctccctgccgttcgctgagtcccagcaattctcctaagttgaagggatctgagaaggagaaggaaatgtggggtagatttggtggtggttagagatatgcccccctcattactgccaacagtttcggctgcatttcttcacgcacctcggttcctcttcctgaagttcttgtgccctgctcttcagcaccatgggccttcttatacggaaggctctgggatctcccccttgtggggcaggctcttggggccagcctaagatcatggtttagggtgatcagtgctggcagataaattgaaaaggcacgctggcttgtgatcttaaatgaggacaatccccccagggctgggcactcctcccctcccctcacttctcccacctgcagagccagtgtccttgggtgggctagataggatatactgtatgccggctccttcaagctgctgactcactttatcaatagttccatttaaattgacttcagtggtgagactgtatcctgtttgctattgcttgttgtgctatggggggaggggggaggaatgtgtaagatagttaacatgggcaaagggagatcttggggtgcagcacttaaactgcctcgtaacccttttcatgatttcaaccacatttgctagagggagggagcagccacggagttagaggcccttggggtttctcttttccactgacaggctttcccaggcagctggctagttcattccctccccagccaggtgcaggcgtaggaatatggacatctggttgctttggcctgctgccctctttcaggggtcctaagcccacaatcatgcctccctaagaccttggcatccttccctctaagccgttggcacctctgtgccacctctcacactggctccagacacacagcctgtgcttttggagctgagatcactcgcttcaccctcctcatctttgttctccaagtaaagccacgaggtcggggcgagggcagaggtgatcacctgcgtgtcccatctacagacctgcagcttcataaaacttctgatttctcttcagctttgaaaagggttaccctgggcactggcctagagcctcacctcctaatagacttagccccatgagtttgccatgttgagcaggactatttctggcacttgcaagtcccatgatttcttcggtaattctgagggtggggggagggacatgaaatcatcttagcttagctttctgtctgtgaatgtctatatagtgtattgtgtgttttaacaaatgatttacactgactgttgctgtaaaagtgaatttggaaataaagttattactctgattaaa

SEQ ID NO: 3945 - DNA, 5811 bp, Homo sapiens
  source 1..5811: mol_type = genomic DNA
ggacggccgagcggcagggcgctcgcgcgcgcccactagtggccggaggagaaggctcccgcggaggccgcgctgcccgccccctcccctggggaggctcgcgttcccgctgctcgcgcctgcgccgcccgccggcctcaggaacgcgccctcttcgccggcgcgcgccctcgcagtcaccgccacccaccagctccggcaccaacagcagcgccgctgccaccgcccaccttctgccgccgccaccacagccaccttctcctcctccgctgtcctctcccgtcctcgcctctgtcgactatcaggtgaactttgaaccaggatggctgagccccgccaggagttcgaagtgatggaagatcacgctgggacgtacgggttgggggacaggaaagatcaggggggctacaccatgcaccaagaccaagagggtgacacggacgctggcctgaaagaatctcccctgcagacccccactgaggacggatctgaggaaccgggctctgaaacctctgatgctaagagcactccaacagcggaagatgtgacagcacccttagtggatgagggagctcccggcaagcaggctgccgcgcagccccacacggagatcccagaaggaaccacagctgaagaagcaggcattggagacacccccagcctggaagacgaagctgctggtcacgtgacccaagctcgcatggtcagtaaaagcaaagacgggactggaagcgatgacaaaaaagccaagggggctgatggtaaaacgaagatcgccacaccgcggggagcagcccctccaggccagaagggccaggccaacgccaccaggattccagcaaaaaccccgcccgctccaaagacaccacccagctctggtgaacctccaaaatcaggggatcgcagcggctacagcagccccggctccccaggcactcccggcagccgctcccgcaccccgtcccttccaaccccacccacccgggagcccaagaaggtggcagtggtccgtactccacccaagtcgccgtcttccgccaagagccgcctgcagacagcccccgtgcccatgccagacctgaagaatgtcaagtccaagatcggctccactgagaacctgaagcaccagccgggaggcgggaaggtgcagataattaataagaagctggatcttagcaacgtccagtccaagtgtggctcaaaggataatatcaaacacgtcccgggaggcggcagtgtgcaaatagtctacaaaccagttgacctgagcaaggtgacctccaagtgtggctcattaggcaacatccatcataaaccaggaggtggccaggtggaagtaaaatctgagaagcttgacttcaaggacagagtccagtcgaagattgggtccctggacaatatcacccacgtccctggcggaggaaataaaaagattgaaacccacaagctgaccttccgcgagaacgccaaagccaagacagaccacggggcggagatcgtgtacaagtcgccagtggtgtctggggacacgtctccacggcatctcagcaatgtctcctccaccggcagcatcgacatggtagactcgccccagctcgccacgctagctgacgaggtgtctgcctccctggccaagcagggtttgtgatcaggcccctggggcggtcaataattgtggagaggagagaatgagagagtgtggaaaaaaaaagaataatgacccggcccccgccctctgcccccagctgctcctcgcagttcggttaattggttaatcacttaacctgcttttgtcactcggctttggctcgggacttcaaaatcagtgatgggagtaagagcaaatttcatctttccaaattgatgggtgggctagtaataaaatatttaaaaaaaaacattcaaaaacatggccacatccaacatttcctcaggcaattccttttgattcttttttcttccccctccatgtagaagagggagaaggagaggctctgaaagctgcttctgggggatttcaagggactgggggtgccaaccacctctggccctgttgtgggggtgtcacagaggcagtggcagcaacaaaggatttgaaacttggtgtgttcgtggagccacaggcagacgatgtcaaccttgtgtgagtgtgacgggggttggggtggggcgggaggccacgggggaggccgaggcaggggctgggcagaggggagaggaagcacaagaagtgggagtgggagaggaagccacgtgctggagagtagacatccccctccttgccgctgggagagccaaggcctatgccacctgcagcgtctgagcggccgcctgtccttggtggccgggggtgggggcctgctgtgggtcagtgtgccaccctctgcagggcagcctgtgggagaagggacagcgggtaaaaagagaaggcaagctggcaggagggtggcacttcgtggatgacctccttagaaaagactgaccttgatgtcttgagagcgctggcctcttcctccctccctgcagggtagggggcctgagttgaggggcttccctctgctccacagaaaccctgttttattgagttctgaaggttggaactgctgccatgattttggccactttgcagacctgggactttagggctaaccagttctctttgtaaggacttgtgcctcttgggagacgtccacccgtttccaagcctgggccactggcatctctggagtgtgtgggggtctgggaggcaggtcccgagccccctgtccttcccacggccactgcagtcaccccgtctgcgccgctgtgctgttgtctgccgtgagagcccaatcactgcctatacccctcatcacacgtcacaatgtcccgaattcccagcctcaccaccccttctcagtaatgaccctggttggttgcaggaggtacctactccatactgagggtgaaattaagggaaggcaaagtccaggcacaagagtgggaccccagcctctcactctcagttccactcatccaactgggaccctcaccacgaatctcatgatctgattcggttccctgtctcctcctcccgtcacagatgtgagccagggcactgctcagctgtgaccctaggtgtttctgccttgttgacatggagagagccctttcccctgagaaggcctggccccttcctgtgctgagcccacagcagcaggctgggtgtcttggttgtcagtggtggcaccaggatggaagggcaaggcacccagggcaggcccacagtcccgctgtcccccacttgcaccctagcttgtagctgccaacctcccagacagcccagcccgctgctcagctccacatgcatagtatcagccctccacacccgacaaaggggaacacacccccttggaaatggttcttttcccccagtcccagctggaagccatgctgtctgttctgctggagcagctgaacatatacatagatgttgccctgccctccccatctgcaccctgttgagttgtagttggatttgtctgtttatgcttggattcaccagagtgactatgatagtgaaaagaaaaaaaaaaaaaaaaaaggacgcatgtatcttgaaatgcttgtaaagaggtttctaacccaccctcacgaggtgtctctcacccccacactgggactcgtgtggcctgtgtggtgccaccctgctggggcctcccaagttttgaaaggctttcctcagcacctgggacccaacagagaccagcttctagcagctaaggaggccgttcagctgtgacgaaggcctgaagcacaggattaggactgaagcgatgatgtccccttccctacttccccttggggctccctgtgtcagggcacagactaggtcttgtggctggtctggcttgcggcgcgaggatggttctctctggtcatagcccgaagtctcatggcagtcccaaaggaggcttacaactcctgcatcacaagaaaaaggaagccactgccagctggggggatctgcagctcccagaagctccgtgagcctcagccacccctcagactgggttcctctccaagctcgccctctggaggggcagcgcagcctcccaccaagggccctgcgaccacagcagggattgggatgaattgcctgtcctggatctgctctagaggcccaagctgcctgcctgaggaaggatgacttgacaagtcaggagacactgttcccaaagccttgaccagagcacctcagcccgctgaccttgcacaaactccatctgctgccatgagaaaagggaagccgcctttgcaaaacattgctgcctaaagaaactcagcagcctcaggcccaattctgccacttctggtttgggtacagttaaaggcaaccctgagggacttggcagtagaaatccagggcctcccctggggctggcagcttcgtgtgcagctagagctttacctgaaaggaagtctctgggcccagaactctccaccaagagcctccctgccgttcgctgagtcccagcaattctcctaagttgaagggatctgagaaggagaaggaaatgtggggtagatttggtggtggttagagatatgcccccctcattactgccaacagtttcggctgcatttcttcacgcacctcggttcctcttcctgaagttcttgtgccctgctcttcagcaccatgggccttcttatacggaaggctctgggatctcccccttgtggggcaggctcttggggccagcctaagatcatggtttagggtgatcagtgctggcagataaattgaaaaggcacgctggcttgtgatcttaaatgaggacaatccccccagggctgggcactcctcccctcccctcacttctcccacctgcagagccagtgtccttgggtgggctagataggatatactgtatgccggctccttcaagctgctgactcactttatcaatagttccatttaaattgacttcagtggtgagactgtatcctgtttgctattgcttgttgtgctatggggggaggggggaggaatgtgtaagatagttaacatgggcaaagggagatcttggggtgcagcacttaaactgcctcgtaacccttttcatgatttcaaccacatttgctagagggagggagcagccacggagttagaggcccttggggtttctcttttccactgacaggctttcccaggcagctggctagttcattccctccccagccaggtgcaggcgtaggaatatggacatctggttgctttggcctgctgccctctttcaggggtcctaagcccacaatcatgcctccctaagaccttggcatccttccctctaagccgttggcacctctgtgccacctctcacactggctccagacacacagcctgtgcttttggagctgagatcactcgcttcaccctcctcatctttgttctccaagtaaagccacgaggtcggggcgagggcagaggtgatcacctgcgtgtcccatctacagacctgcagcttcataaaacttctgatttctcttcagctttgaaaagggttaccctgggcactggcctagagcctcacctcctaatagacttagccccatgagtttgccatgttgagcaggactatttctggcacttgcaagtcccatgatttcttcggtaattctgagggtggggggagggacatgaaatcatcttagcttagctttctgtctgtgaatgtctatatagtgtattgtgtgttttaacaaatgatttacactgactgttgctgtaaaagtgaatttggaaataaagttattactctgattaaa

SEQ ID NO: 3946 - DNA, 5637 bp, Homo sapiens
  source 1..5637: mol_type = genomic DNA
ggacggccgagcggcagggcgctcgcgcgcgcccactagtggccggaggagaaggctcccgcggaggccgcgctgcccgccccctcccctggggaggctcgcgttcccgctgctcgcgcctgcgccgcccgccggcctcaggaacgcgccctcttcgccggcgcgcgccctcgcagtcaccgccacccaccagctccggcaccaacagcagcgccgctgccaccgcccaccttctgccgccgccaccacagccaccttctcctcctccgctgtcctctcccgtcctcgcctctgtcgactatcaggtgaactttgaaccaggatggctgagccccgccaggagttcgaagtgatggaagatcacgctgggacgtacgggttgggggacaggaaagatcaggggggctacaccatgcaccaagaccaagagggtgacacggacgctggcctgaaagctgaagaagcaggcattggagacacccccagcctggaagacgaagctgctggtcacgtgacccaagctcgcatggtcagtaaaagcaaagacgggactggaagcgatgacaaaaaagccaagggggctgatggtaaaacgaagatcgccacaccgcggggagcagcccctccaggccagaagggccaggccaacgccaccaggattccagcaaaaaccccgcccgctccaaagacaccacccagctctggtgaacctccaaaatcaggggatcgcagcggctacagcagccccggctccccaggcactcccggcagccgctcccgcaccccgtcccttccaaccccacccacccgggagcccaagaaggtggcagtggtccgtactccacccaagtcgccgtcttccgccaagagccgcctgcagacagcccccgtgcccatgccagacctgaagaatgtcaagtccaagatcggctccactgagaacctgaagcaccagccgggaggcgggaaggtgcagataattaataagaagctggatcttagcaacgtccagtccaagtgtggctcaaaggataatatcaaacacgtcccgggaggcggcagtgtgcaaatagtctacaaaccagttgacctgagcaaggtgacctccaagtgtggctcattaggcaacatccatcataaaccaggaggtggccaggtggaagtaaaatctgagaagcttgacttcaaggacagagtccagtcgaagattgggtccctggacaatatcacccacgtccctggcggaggaaataaaaagattgaaacccacaagctgaccttccgcgagaacgccaaagccaagacagaccacggggcggagatcgtgtacaagtcgccagtggtgtctggggacacgtctccacggcatctcagcaatgtctcctccaccggcagcatcgacatggtagactcgccccagctcgccacgctagctgacgaggtgtctgcctccctggccaagcagggtttgtgatcaggcccctggggcggtcaataattgtggagaggagagaatgagagagtgtggaaaaaaaaagaataatgacccggcccccgccctctgcccccagctgctcctcgcagttcggttaattggttaatcacttaacctgcttttgtcactcggctttggctcgggacttcaaaatcagtgatgggagtaagagcaaatttcatctttccaaattgatgggtgggctagtaataaaatatttaaaaaaaaacattcaaaaacatggccacatccaacatttcctcaggcaattccttttgattcttttttcttccccctccatgtagaagagggagaaggagaggctctgaaagctgcttctgggggatttcaagggactgggggtgccaaccacctctggccctgttgtgggggtgtcacagaggcagtggcagcaacaaaggatttgaaacttggtgtgttcgtggagccacaggcagacgatgtcaaccttgtgtgagtgtgacgggggttggggtggggcgggaggccacgggggaggccgaggcaggggctgggcagaggggagaggaagcacaagaagtgggagtgggagaggaagccacgtgctggagagtagacatccccctccttgccgctgggagagccaaggcctatgccacctgcagcgtctgagcggccgcctgtccttggtggccgggggtgggggcctgctgtgggtcagtgtgccaccctctgcagggcagcctgtgggagaagggacagcgggtaaaaagagaaggcaagctggcaggagggtggcacttcgtggatgacctccttagaaaagactgaccttgatgtcttgagagcgctggcctcttcctccctccctgcagggtagggggcctgagttgaggggcttccctctgctccacagaaaccctgttttattgagttctgaaggttggaactgctgccatgattttggccactttgcagacctgggactttagggctaaccagttctctttgtaaggacttgtgcctcttgggagacgtccacccgtttccaagcctgggccactggcatctctggagtgtgtgggggtctgggaggcaggtcccgagccccctgtccttcccacggccactgcagtcaccccgtctgcgccgctgtgctgttgtctgccgtgagagcccaatcactgcctatacccctcatcacacgtcacaatgtcccgaattcccagcctcaccaccccttctcagtaatgaccctggttggttgcaggaggtacctactccatactgagggtgaaattaagggaaggcaaagtccaggcacaagagtgggaccccagcctctcactctcagttccactcatccaactgggaccctcaccacgaatctcatgatctgattcggttccctgtctcctcctcccgtcacagatgtgagccagggcactgctcagctgtgaccctaggtgtttctgccttgttgacatggagagagccctttcccctgagaaggcctggccccttcctgtgctgagcccacagcagcaggctgggtgtcttggttgtcagtggtggcaccaggatggaagggcaaggcacccagggcaggcccacagtcccgctgtcccccacttgcaccctagcttgtagctgccaacctcccagacagcccagcccgctgctcagctccacatgcatagtatcagccctccacacccgacaaaggggaacacacccccttggaaatggttcttttcccccagtcccagctggaagccatgctgtctgttctgctggagcagctgaacatatacatagatgttgccctgccctccccatctgcaccctgttgagttgtagttggatttgtctgtttatgcttggattcaccagagtgactatgatagtgaaaagaaaaaaaaaaaaaaaaaaggacgcatgtatcttgaaatgcttgtaaagaggtttctaacccaccctcacgaggtgtctctcacccccacactgggactcgtgtggcctgtgtggtgccaccctgctggggcctcccaagttttgaaaggctttcctcagcacctgggacccaacagagaccagcttctagcagctaaggaggccgttcagctgtgacgaaggcctgaagcacaggattaggactgaagcgatgatgtccccttccctacttccccttggggctccctgtgtcagggcacagactaggtcttgtggctggtctggcttgcggcgcgaggatggttctctctggtcatagcccgaagtctcatggcagtcccaaaggaggcttacaactcctgcatcacaagaaaaaggaagccactgccagctggggggatctgcagctcccagaagctccgtgagcctcagccacccctcagactgggttcctctccaagctcgccctctggaggggcagcgcagcctcccaccaagggccctgcgaccacagcagggattgggatgaattgcctgtcctggatctgctctagaggcccaagctgcctgcctgaggaaggatgacttgacaagtcaggagacactgttcccaaagccttgaccagagcacctcagcccgctgaccttgcacaaactccatctgctgccatgagaaaagggaagccgcctttgcaaaacattgctgcctaaagaaactcagcagcctcaggcccaattctgccacttctggtttgggtacagttaaaggcaaccctgagggacttggcagtagaaatccagggcctcccctggggctggcagcttcgtgtgcagctagagctttacctgaaaggaagtctctgggcccagaactctccaccaagagcctccctgccgttcgctgagtcccagcaattctcctaagttgaagggatctgagaaggagaaggaaatgtggggtagatttggtggtggttagagatatgcccccctcattactgccaacagtttcggctgcatttcttcacgcacctcggttcctcttcctgaagttcttgtgccctgctcttcagcaccatgggccttcttatacggaaggctctgggatctcccccttgtggggcaggctcttggggccagcctaagatcatggtttagggtgatcagtgctggcagataaattgaaaaggcacgctggcttgtgatcttaaatgaggacaatccccccagggctgggcactcctcccctcccctcacttctcccacctgcagagccagtgtccttgggtgggctagataggatatactgtatgccggctccttcaagctgctgactcactttatcaatagttccatttaaattgacttcagtggtgagactgtatcctgtttgctattgcttgttgtgctatggggggaggggggaggaatgtgtaagatagttaacatgggcaaagggagatcttggggtgcagcacttaaactgcctcgtaacccttttcatgatttcaaccacatttgctagagggagggagcagccacggagttagaggcccttggggtttctcttttccactgacaggctttcccaggcagctggctagttcattccctccccagccaggtgcaggcgtaggaatatggacatctggttgctttggcctgctgccctctttcaggggtcctaagcccacaatcatgcctccctaagaccttggcatccttccctctaagccgttggcacctctgtgccacctctcacactggctccagacacacagcctgtgcttttggagctgagatcactcgcttcaccctcctcatctttgttctccaagtaaagccacgaggtcggggcgagggcagaggtgatcacctgcgtgtcccatctacagacctgcagcttcataaaacttctgatttctcttcagctttgaaaagggttaccctgggcactggcctagagcctcacctcctaatagacttagccccatgagtttgccatgttgagcaggactatttctggcacttgcaagtcccatgatttcttcggtaattctgagggtggggggagggacatgaaatcatcttagcttagctttctgtctgtgaatgtctatatagtgtattgtgtgttttaacaaatgatttacactgactgttgctgtaaaagtgaatttggaaataaagttattactctgattaaa

SEQ ID NO: 3947 - DNA, 5544 bp, Homo sapiens
  source 1..5544: mol_type = genomic DNA
ggacggccgagcggcagggcgctcgcgcgcgcccactagtggccggaggagaaggctcccgcggaggccgcgctgcccgccccctcccctggggaggctcgcgttcccgctgctcgcgcctgcgccgcccgccggcctcaggaacgcgccctcttcgccggcgcgcgccctcgcagtcaccgccacccaccagctccggcaccaacagcagcgccgctgccaccgcccaccttctgccgccgccaccacagccaccttctcctcctccgctgtcctctcccgtcctcgcctctgtcgactatcaggtgaactttgaaccaggatggctgagccccgccaggagttcgaagtgatggaagatcacgctgggacgtacgggttgggggacaggaaagatcaggggggctacaccatgcaccaagaccaagagggtgacacggacgctggcctgaaagctgaagaagcaggcattggagacacccccagcctggaagacgaagctgctggtcacgtgacccaagctcgcatggtcagtaaaagcaaagacgggactggaagcgatgacaaaaaagccaagggggctgatggtaaaacgaagatcgccacaccgcggggagcagcccctccaggccagaagggccaggccaacgccaccaggattccagcaaaaaccccgcccgctccaaagacaccacccagctctggtgaacctccaaaatcaggggatcgcagcggctacagcagccccggctccccaggcactcccggcagccgctcccgcaccccgtcccttccaaccccacccacccgggagcccaagaaggtggcagtggtccgtactccacccaagtcgccgtcttccgccaagagccgcctgcagacagcccccgtgcccatgccagacctgaagaatgtcaagtccaagatcggctccactgagaacctgaagcaccagccgggaggcgggaaggtgcaaatagtctacaaaccagttgacctgagcaaggtgacctccaagtgtggctcattaggcaacatccatcataaaccaggaggtggccaggtggaagtaaaatctgagaagcttgacttcaaggacagagtccagtcgaagattgggtccctggacaatatcacccacgtccctggcggaggaaataaaaagattgaaacccacaagctgaccttccgcgagaacgccaaagccaagacagaccacggggcggagatcgtgtacaagtcgccagtggtgtctggggacacgtctccacggcatctcagcaatgtctcctccaccggcagcatcgacatggtagactcgccccagctcgccacgctagctgacgaggtgtctgcctccctggccaagcagggtttgtgatcaggcccctggggcggtcaataattgtggagaggagagaatgagagagtgtggaaaaaaaaagaataatgacccggcccccgccctctgcccccagctgctcctcgcagttcggttaattggttaatcacttaacctgcttttgtcactcggctttggctcgggacttcaaaatcagtgatgggagtaagagcaaatttcatctttccaaattgatgggtgggctagtaataaaatatttaaaaaaaaacattcaaaaacatggccacatccaacatttcctcaggcaattccttttgattcttttttcttccccctccatgtagaagagggagaaggagaggctctgaaagctgcttctgggggatttcaagggactgggggtgccaaccacctctggccctgttgtgggggtgtcacagaggcagtggcagcaacaaaggatttgaaacttggtgtgttcgtggagccacaggcagacgatgtcaaccttgtgtgagtgtgacgggggttggggtggggcgggaggccacgggggaggccgaggcaggggctgggcagaggggagaggaagcacaagaagtgggagtgggagaggaagccacgtgctggagagtagacatccccctccttgccgctgggagagccaaggcctatgccacctgcagcgtctgagcggccgcctgtccttggtggccgggggtgggggcctgctgtgggtcagtgtgccaccctctgcagggcagcctgtgggagaagggacagcgggtaaaaagagaaggcaagctggcaggagggtggcacttcgtggatgacctccttagaaaagactgaccttgatgtcttgagagcgctggcctcttcctccctccctgcagggtagggggcctgagttgaggggcttccctctgctccacagaaaccctgttttattgagttctgaaggttggaactgctgccatgattttggccactttgcagacctgggactttagggctaaccagttctctttgtaaggacttgtgcctcttgggagacgtccacccgtttccaagcctgggccactggcatctctggagtgtgtgggggtctgggaggcaggtcccgagccccctgtccttcccacggccactgcagtcaccccgtctgcgccgctgtgctgttgtctgccgtgagagcccaatcactgcctatacccctcatcacacgtcacaatgtcccgaattcccagcctcaccaccccttctcagtaatgaccctggttggttgcaggaggtacctactccatactgagggtgaaattaagggaaggcaaagtccaggcacaagagtgggaccccagcctctcactctcagttccactcatccaactgggaccctcaccacgaatctcatgatctgattcggttccctgtctcctcctcccgtcacagatgtgagccagggcactgctcagctgtgaccctaggtgtttctgccttgttgacatggagagagccctttcccctgagaaggcctggccccttcctgtgctgagcccacagcagcaggctgggtgtcttggttgtcagtggtggcaccaggatggaagggcaaggcacccagggcaggcccacagtcccgctgtcccccacttgcaccctagcttgtagctgccaacctcccagacagcccagcccgctgctcagctccacatgcatagtatcagccctccacacccgacaaaggggaacacacccccttggaaatggttcttttcccccagtcccagctggaagccatgctgtctgttctgctggagcagctgaacatatacatagatgttgccctgccctccccatctgcaccctgttgagttgtagttggatttgtctgtttatgcttggattcaccagagtgactatgatagtgaaaagaaaaaaaaaaaaaaaaaaggacgcatgtatcttgaaatgcttgtaaagaggtttctaacccaccctcacgaggtgtctctcacccccacactgggactcgtgtggcctgtgtggtgccaccctgctggggcctcccaagttttgaaaggctttcctcagcacctgggacccaacagagaccagcttctagcagctaaggaggccgttcagctgtgacgaaggcctgaagcacaggattaggactgaagcgatgatgtccccttccctacttccccttggggctccctgtgtcagggcacagactaggtcttgtggctggtctggcttgcggcgcgaggatggttctctctggtcatagcccgaagtctcatggcagtcccaaaggaggcttacaactcctgcatcacaagaaaaaggaagccactgccagctggggggatctgcagctcccagaagctccgtgagcctcagccacccctcagactgggttcctctccaagctcgccctctggaggggcagcgcagcctcccaccaagggccctgcgaccacagcagggattgggatgaattgcctgtcctggatctgctctagaggcccaagctgcctgcctgaggaaggatgacttgacaagtcaggagacactgttcccaaagccttgaccagagcacctcagcccgctgaccttgcacaaactccatctgctgccatgagaaaagggaagccgcctttgcaaaacattgctgcctaaagaaactcagcagcctcaggcccaattctgccacttctggtttgggtacagttaaaggcaaccctgagggacttggcagtagaaatccagggcctcccctggggctggcagcttcgtgtgcagctagagctttacctgaaaggaagtctctgggcccagaactctccaccaagagcctccctgccgttcgctgagtcccagcaattctcctaagttgaagggatctgagaaggagaaggaaatgtggggtagatttggtggtggttagagatatgcccccctcattactgccaacagtttcggctgcatttcttcacgcacctcggttcctcttcctgaagttcttgtgccctgctcttcagcaccatgggccttcttatacggaaggctctgggatctcccccttgtggggcaggctcttggggccagcctaagatcatggtttagggtgatcagtgctggcagataaattgaaaaggcacgctggcttgtgatcttaaatgaggacaatccccccagggctgggcactcctcccctcccctcacttctcccacctgcagagccagtgtccttgggtgggctagataggatatactgtatgccggctccttcaagctgctgactcactttatcaatagttccatttaaattgacttcagtggtgagactgtatcctgtttgctattgcttgttgtgctatggggggaggggggaggaatgtgtaagatagttaacatgggcaaagggagatcttggggtgcagcacttaaactgcctcgtaacccttttcatgatttcaaccacatttgctagagggagggagcagccacggagttagaggcccttggggtttctcttttccactgacaggctttcccaggcagctggctagttcattccctccccagccaggtgcaggcgtaggaatatggacatctggttgctttggcctgctgccctctttcaggggtcctaagcccacaatcatgcctccctaagaccttggcatccttccctctaagccgttggcacctctgtgccacctctcacactggctccagacacacagcctgtgcttttggagctgagatcactcgcttcaccctcctcatctttgttctccaagtaaagccacgaggtcggggcgagggcagaggtgatcacctgcgtgtcccatctacagacctgcagcttcataaaacttctgatttctcttcagctttgaaaagggttaccctgggcactggcctagagcctcacctcctaatagacttagccccatgagtttgccatgttgagcaggactatttctggcacttgcaagtcccatgatttcttcggtaattctgagggtggggggagggacatgaaatcatcttagcttagctttctgtctgtgaatgtctatatagtgtattgtgtgttttaacaaatgatttacactgactgttgctgtaaaagtgaatttggaaataaagttattactctgattaaa

SEQ ID NO: 3948 - DNA, 5724 bp, Homo sapiens
  source 1..5724: mol_type = genomic DNA
ggacggccgagcggcagggcgctcgcgcgcgcccactagtggccggaggagaaggctcccgcggaggccgcgctgcccgccccctcccctggggaggctcgcgttcccgctgctcgcgcctgcgccgcccgccggcctcaggaacgcgccctcttcgccggcgcgcgccctcgcagtcaccgccacccaccagctccggcaccaacagcagcgccgctgccaccgcccaccttctgccgccgccaccacagccaccttctcctcctccgctgtcctctcccgtcctcgcctctgtcgactatcaggtgaactttgaaccaggatggctgagccccgccaggagttcgaagtgatggaagatcacgctgggacgtacgggttgggggacaggaaagatcaggggggctacaccatgcaccaagaccaagagggtgacacggacgctggcctgaaagaatctcccctgcagacccccactgaggacggatctgaggaaccgggctctgaaacctctgatgctaagagcactccaacagcggaagctgaagaagcaggcattggagacacccccagcctggaagacgaagctgctggtcacgtgacccaagctcgcatggtcagtaaaagcaaagacgggactggaagcgatgacaaaaaagccaagggggctgatggtaaaacgaagatcgccacaccgcggggagcagcccctccaggccagaagggccaggccaacgccaccaggattccagcaaaaaccccgcccgctccaaagacaccacccagctctggtgaacctccaaaatcaggggatcgcagcggctacagcagccccggctccccaggcactcccggcagccgctcccgcaccccgtcccttccaaccccacccacccgggagcccaagaaggtggcagtggtccgtactccacccaagtcgccgtcttccgccaagagccgcctgcagacagcccccgtgcccatgccagacctgaagaatgtcaagtccaagatcggctccactgagaacctgaagcaccagccgggaggcgggaaggtgcagataattaataagaagctggatcttagcaacgtccagtccaagtgtggctcaaaggataatatcaaacacgtcccgggaggcggcagtgtgcaaatagtctacaaaccagttgacctgagcaaggtgacctccaagtgtggctcattaggcaacatccatcataaaccaggaggtggccaggtggaagtaaaatctgagaagcttgacttcaaggacagagtccagtcgaagattgggtccctggacaatatcacccacgtccctggcggaggaaataaaaagattgaaacccacaagctgaccttccgcgagaacgccaaagccaagacagaccacggggcggagatcgtgtacaagtcgccagtggtgtctggggacacgtctccacggcatctcagcaatgtctcctccaccggcagcatcgacatggtagactcgccccagctcgccacgctagctgacgaggtgtctgcctccctggccaagcagggtttgtgatcaggcccctggggcggtcaataattgtggagaggagagaatgagagagtgtggaaaaaaaaagaataatgacccggcccccgccctctgcccccagctgctcctcgcagttcggttaattggttaatcacttaacctgcttttgtcactcggctttggctcgggacttcaaaatcagtgatgggagtaagagcaaatttcatctttccaaattgatgggtgggctagtaataaaatatttaaaaaaaaacattcaaaaacatggccacatccaacatttcctcaggcaattccttttgattcttttttcttccccctccatgtagaagagggagaaggagaggctctgaaagctgcttctgggggatttcaagggactgggggtgccaaccacctctggccctgttgtgggggtgtcacagaggcagtggcagcaacaaaggatttgaaacttggtgtgttcgtggagccacaggcagacgatgtcaaccttgtgtgagtgtgacgggggttggggtggggcgggaggccacgggggaggccgaggcaggggctgggcagaggggagaggaagcacaagaagtgggagtgggagaggaagccacgtgctggagagtagacatccccctccttgccgctgggagagccaaggcctatgccacctgcagcgtctgagcggccgcctgtccttggtggccgggggtgggggcctgctgtgggtcagtgtgccaccctctgcagggcagcctgtgggagaagggacagcgggtaaaaagagaaggcaagctggcaggagggtggcacttcgtggatgacctccttagaaaagactgaccttgatgtcttgagagcgctggcctcttcctccctccctgcagggtagggggcctgagttgaggggcttccctctgctccacagaaaccctgttttattgagttctgaaggttggaactgctgccatgattttggccactttgcagacctgggactttagggctaaccagttctctttgtaaggacttgtgcctcttgggagacgtccacccgtttccaagcctgggccactggcatctctggagtgtgtgggggtctgggaggcaggtcccgagccccctgtccttcccacggccactgcagtcaccccgtctgcgccgctgtgctgttgtctgccgtgagagcccaatcactgcctatacccctcatcacacgtcacaatgtcccgaattcccagcctcaccaccccttctcagtaatgaccctggttggttgcaggaggtacctactccatactgagggtgaaattaagggaaggcaaagtccaggcacaagagtgggaccccagcctctcactctcagttccactcatccaactgggaccctcaccacgaatctcatgatctgattcggttccctgtctcctcctcccgtcacagatgtgagccagggcactgctcagctgtgaccctaggtgtttctgccttgttgacatggagagagccctttcccctgagaaggcctggccccttcctgtgctgagcccacagcagcaggctgggtgtcttggttgtcagtggtggcaccaggatggaagggcaaggcacccagggcaggcccacagtcccgctgtcccccacttgcaccctagcttgtagctgccaacctcccagacagcccagcccgctgctcagctccacatgcatagtatcagccctccacacccgacaaaggggaacacacccccttggaaatggttcttttcccccagtcccagctggaagccatgctgtctgttctgctggagcagctgaacatatacatagatgttgccctgccctccccatctgcaccctgttgagttgtagttggatttgtctgtttatgcttggattcaccagagtgactatgatagtgaaaagaaaaaaaaaaaaaaaaaaggacgcatgtatcttgaaatgcttgtaaagaggtttctaacccaccctcacgaggtgtctctcacccccacactgggactcgtgtggcctgtgtggtgccaccctgctggggcctcccaagttttgaaaggctttcctcagcacctgggacccaacagagaccagcttctagcagctaaggaggccgttcagctgtgacgaaggcctgaagcacaggattaggactgaagcgatgatgtccccttccctacttccccttggggctccctgtgtcagggcacagactaggtcttgtggctggtctggcttgcggcgcgaggatggttctctctggtcatagcccgaagtctcatggcagtcccaaaggaggcttacaactcctgcatcacaagaaaaaggaagccactgccagctggggggatctgcagctcccagaagctccgtgagcctcagccacccctcagactgggttcctctccaagctcgccctctggaggggcagcgcagcctcccaccaagggccctgcgaccacagcagggattgggatgaattgcctgtcctggatctgctctagaggcccaagctgcctgcctgaggaaggatgacttgacaagtcaggagacactgttcccaaagccttgaccagagcacctcagcccgctgaccttgcacaaactccatctgctgccatgagaaaagggaagccgcctttgcaaaacattgctgcctaaagaaactcagcagcctcaggcccaattctgccacttctggtttgggtacagttaaaggcaaccctgagggacttggcagtagaaatccagggcctcccctggggctggcagcttcgtgtgcagctagagctttacctgaaaggaagtctctgggcccagaactctccaccaagagcctccctgccgttcgctgagtcccagcaattctcctaagttgaagggatctgagaaggagaaggaaatgtggggtagatttggtggtggttagagatatgcccccctcattactgccaacagtttcggctgcatttcttcacgcacctcggttcctcttcctgaagttcttgtgccctgctcttcagcaccatgggccttcttatacggaaggctctgggatctcccccttgtggggcaggctcttggggccagcctaagatcatggtttagggtgatcagtgctggcagataaattgaaaaggcacgctggcttgtgatcttaaatgaggacaatccccccagggctgggcactcctcccctcccctcacttctcccacctgcagagccagtgtccttgggtgggctagataggatatactgtatgccggctccttcaagctgctgactcactttatcaatagttccatttaaattgacttcagtggtgagactgtatcctgtttgctattgcttgttgtgctatggggggaggggggaggaatgtgtaagatagttaacatgggcaaagggagatcttggggtgcagcacttaaactgcctcgtaacccttttcatgatttcaaccacatttgctagagggagggagcagccacggagttagaggcccttggggtttctcttttccactgacaggctttcccaggcagctggctagttcattccctccccagccaggtgcaggcgtaggaatatggacatctggttgctttggcctgctgccctctttcaggggtcctaagcccacaatcatgcctccctaagaccttggcatccttccctctaagccgttggcacctctgtgccacctctcacactggctccagacacacagcctgtgcttttggagctgagatcactcgcttcaccctcctcatctttgttctccaagtaaagccacgaggtcggggcgagggcagaggtgatcacctgcgtgtcccatctacagacctgcagcttcataaaacttctgatttctcttcagctttgaaaagggttaccctgggcactggcctagagcctcacctcctaatagacttagccccatgagtttgccatgttgagcaggactatttctggcacttgcaagtcccatgatttcttcggtaattctgagggtggggggagggacatgaaatcatcttagcttagctttctgtctgtgaatgtctatatagtgtattgtgtgttttaacaaatgatttacactgactgttgctgtaaaagtgaatttggaaataaagttattactctgattaaa

SEQ ID NO: 3949 - DNA, 6816 bp, Homo sapiens
  source 1..6816: mol_type = genomic DNA
ggacggccgagcggcagggcgctcgcgcgcgcccactagtggccggaggagaaggctcccgcggaggccgcgctgcccgccccctcccctggggaggctcgcgttcccgctgctcgcgcctgcgccgcccgccggcctcaggaacgcgccctcttcgccggcgcgcgccctcgcagtcaccgccacccaccagctccggcaccaacagcagcgccgctgccaccgcccaccttctgccgccgccaccacagccaccttctcctcctccgctgtcctctcccgtcctcgcctctgtcgactatcaggtgaactttgaaccaggatggctgagccccgccaggagttcgaagtgatggaagatcacgctgggacgtacgggttgggggacaggaaagatcaggggggctacaccatgcaccaagaccaagagggtgacacggacgctggcctgaaagaatctcccctgcagacccccactgaggacggatctgaggaaccgggctctgaaacctctgatgctaagagcactccaacagcggaagatgtgacagcacccttagtggatgagggagctcccggcaagcaggctgccgcgcagccccacacggagatcccagaaggaaccacagctgaagaagcaggcattggagacacccccagcctggaagacgaagctgctggtcacgtgacccaagagcctgaaagtggtaaggtggtccaggaaggcttcctccgagagccaggccccccaggtctgagccaccagctcatgtccggcatgcctggggctcccctcctgcctgagggccccagagaggccacacgccaaccttcggggacaggacctgaggacacagagggcggccgccacgcccctgagctgctcaagcaccagcttctaggagacctgcaccaggaggggccgccgctgaagggggcagggggcaaagagaggccggggagcaaggaggaggtggatgaagaccgcgacgtcgatgagtcctccccccaagactcccctccctccaaggcctccccagcccaagatgggcggcctccccagacagccgccagagaagccaccagcatcccaggcttcccagcggagggtgccatccccctccctgtggatttcctctccaaagtttccacagagatcccagcctcagagcccgacgggcccagtgtagggcgggccaaagggcaggatgcccccctggagttcacgtttcacgtggaaatcacacccaacgtgcagaaggagcaggcgcactcggaggagcatttgggaagggctgcatttccaggggcccctggagaggggccagaggcccggggcccctctttgggagaggacacaaaagaggctgaccttccagagccctctgaaaagcagcctgctgctgctccgcgggggaagcccgtcagccgggtccctcaactcaaagctcgcatggtcagtaaaagcaaagacgggactggaagcgatgacaaaaaagccaagacatccacacgttcctctgctaaaaccttgaaaaataggccttgccttagccccaaacaccccactcctggtagctcagaccctctgatccaaccctccagccctgctgtgtgcccagagccaccttcctctcctaaatacgtctcttctgtcacttcccgaactggcagttctggagcaaaggagatgaaactcaagggggctgatggtaaaacgaagatcgccacaccgcggggagcagcccctccaggccagaagggccaggccaacgccaccaggattccagcaaaaaccccgcccgctccaaagacaccacccagctctgcgactaagcaagtccagagaagaccaccccctgcagggcccagatctgagagaggtgaacctccaaaatcaggggatcgcagcggctacagcagccccggctccccaggcactcccggcagccgctcccgcaccccgtcccttccaaccccacccacccgggagcccaagaaggtggcagtggtccgtactccacccaagtcgccgtcttccgccaagagccgcctgcagacagcccccgtgcccatgccagacctgaagaatgtcaagtccaagatcggctccactgagaacctgaagcaccagccgggaggcgggaaggtgcagataattaataagaagctggatcttagcaacgtccagtccaagtgtggctcaaaggataatatcaaacacgtcccgggaggcggcagtgtgcaaatagtctacaaaccagttgacctgagcaaggtgacctccaagtgtggctcattaggcaacatccatcataaaccaggaggtggccaggtggaagtaaaatctgagaagcttgacttcaaggacagagtccagtcgaagattgggtccctggacaatatcacccacgtccctggcggaggaaataaaaagattgaaacccacaagctgaccttccgcgagaacgccaaagccaagacagaccacggggcggagatcgtgtacaagtcgccagtggtgtctggggacacgtctccacggcatctcagcaatgtctcctccaccggcagcatcgacatggtagactcgccccagctcgccacgctagctgacgaggtgtctgcctccctggccaagcagggtttgtgatcaggcccctggggcggtcaataattgtggagaggagagaatgagagagtgtggaaaaaaaaagaataatgacccggcccccgccctctgcccccagctgctcctcgcagttcggttaattggttaatcacttaacctgcttttgtcactcggctttggctcgggacttcaaaatcagtgatgggagtaagagcaaatttcatctttccaaattgatgggtgggctagtaataaaatatttaaaaaaaaacattcaaaaacatggccacatccaacatttcctcaggcaattccttttgattcttttttcttccccctccatgtagaagagggagaaggagaggctctgaaagctgcttctgggggatttcaagggactgggggtgccaaccacctctggccctgttgtgggggtgtcacagaggcagtggcagcaacaaaggatttgaaacttggtgtgttcgtggagccacaggcagacgatgtcaaccttgtgtgagtgtgacgggggttggggtggggcgggaggccacgggggaggccgaggcaggggctgggcagaggggagaggaagcacaagaagtgggagtgggagaggaagccacgtgctggagagtagacatccccctccttgccgctgggagagccaaggcctatgccacctgcagcgtctgagcggccgcctgtccttggtggccgggggtgggggcctgctgtgggtcagtgtgccaccctctgcagggcagcctgtgggagaagggacagcgggtaaaaagagaaggcaagctggcaggagggtggcacttcgtggatgacctccttagaaaagactgaccttgatgtcttgagagcgctggcctcttcctccctccctgcagggtagggggcctgagttgaggggcttccctctgctccacagaaaccctgttttattgagttctgaaggttggaactgctgccatgattttggccactttgcagacctgggactttagggctaaccagttctctttgtaaggacttgtgcctcttgggagacgtccacccgtttccaagcctgggccactggcatctctggagtgtgtgggggtctgggaggcaggtcccgagccccctgtccttcccacggccactgcagtcaccccgtctgcgccgctgtgctgttgtctgccgtgagagcccaatcactgcctatacccctcatcacacgtcacaatgtcccgaattcccagcctcaccaccccttctcagtaatgaccctggttggttgcaggaggtacctactccatactgagggtgaaattaagggaaggcaaagtccaggcacaagagtgggaccccagcctctcactctcagttccactcatccaactgggaccctcaccacgaatctcatgatctgattcggttccctgtctcctcctcccgtcacagatgtgagccagggcactgctcagctgtgaccctaggtgtttctgccttgttgacatggagagagccctttcccctgagaaggcctggccccttcctgtgctgagcccacagcagcaggctgggtgtcttggttgtcagtggtggcaccaggatggaagggcaaggcacccagggcaggcccacagtcccgctgtcccccacttgcaccctagcttgtagctgccaacctcccagacagcccagcccgctgctcagctccacatgcatagtatcagccctccacacccgacaaaggggaacacacccccttggaaatggttcttttcccccagtcccagctggaagccatgctgtctgttctgctggagcagctgaacatatacatagatgttgccctgccctccccatctgcaccctgttgagttgtagttggatttgtctgtttatgcttggattcaccagagtgactatgatagtgaaaagaaaaaaaaaaaaaaaaaaggacgcatgtatcttgaaatgcttgtaaagaggtttctaacccaccctcacgaggtgtctctcacccccacactgggactcgtgtggcctgtgtggtgccaccctgctggggcctcccaagttttgaaaggctttcctcagcacctgggacccaacagagaccagcttctagcagctaaggaggccgttcagctgtgacgaaggcctgaagcacaggattaggactgaagcgatgatgtccccttccctacttccccttggggctccctgtgtcagggcacagactaggtcttgtggctggtctggcttgcggcgcgaggatggttctctctggtcatagcccgaagtctcatggcagtcccaaaggaggcttacaactcctgcatcacaagaaaaaggaagccactgccagctggggggatctgcagctcccagaagctccgtgagcctcagccacccctcagactgggttcctctccaagctcgccctctggaggggcagcgcagcctcccaccaagggccctgcgaccacagcagggattgggatgaattgcctgtcctggatctgctctagaggcccaagctgcctgcctgaggaaggatgacttgacaagtcaggagacactgttcccaaagccttgaccagagcacctcagcccgctgaccttgcacaaactccatctgctgccatgagaaaagggaagccgcctttgcaaaacattgctgcctaaagaaactcagcagcctcaggcccaattctgccacttctggtttgggtacagttaaaggcaaccctgagggacttggcagtagaaatccagggcctcccctggggctggcagcttcgtgtgcagctagagctttacctgaaaggaagtctctgggcccagaactctccaccaagagcctccctgccgttcgctgagtcccagcaattctcctaagttgaagggatctgagaaggagaaggaaatgtggggtagatttggtggtggttagagatatgcccccctcattactgccaacagtttcggctgcatttcttcacgcacctcggttcctcttcctgaagttcttgtgccctgctcttcagcaccatgggccttcttatacggaaggctctgggatctcccccttgtggggcaggctcttggggccagcctaagatcatggtttagggtgatcagtgctggcagataaattgaaaaggcacgctggcttgtgatcttaaatgaggacaatccccccagggctgggcactcctcccctcccctcacttctcccacctgcagagccagtgtccttgggtgggctagataggatatactgtatgccggctccttcaagctgctgactcactttatcaatagttccatttaaattgacttcagtggtgagactgtatcctgtttgctattgcttgttgtgctatggggggaggggggaggaatgtgtaagatagttaacatgggcaaagggagatcttggggtgcagcacttaaactgcctcgtaacccttttcatgatttcaaccacatttgctagagggagggagcagccacggagttagaggcccttggggtttctcttttccactgacaggctttcccaggcagctggctagttcattccctccccagccaggtgcaggcgtaggaatatggacatctggttgctttggcctgctgccctctttcaggggtcctaagcccacaatcatgcctccctaagaccttggcatccttccctctaagccgttggcacctctgtgccacctctcacactggctccagacacacagcctgtgcttttggagctgagatcactcgcttcaccctcctcatctttgttctccaagtaaagccacgaggtcggggcgagggcagaggtgatcacctgcgtgtcccatctacagacctgcagcttcataaaacttctgatttctcttcagctttgaaaagggttaccctgggcactggcctagagcctcacctcctaatagacttagccccatgagtttgccatgttgagcaggactatttctggcacttgcaagtcccatgatttcttcggtaattctgagggtggggggagggacatgaaatcatcttagcttagctttctgtctgtgaatgtctatatagtgtattgtgtgttttaacaaatgatttacactgactgttgctgtaaaagtgaatttggaaataaagttattactctgattaaa

SEQ ID NO: 3950 - DNA, 5631 bp, Homo sapiens
  source 1..5631: mol_type = genomic DNA
ggacggccgagcggcagggcgctcgcgcgcgcccactagtggccggaggagaaggctcccgcggaggccgcgctgcccgccccctcccctggggaggctcgcgttcccgctgctcgcgcctgcgccgcccgccggcctcaggaacgcgccctcttcgccggcgcgcgccctcgcagtcaccgccacccaccagctccggcaccaacagcagcgccgctgccaccgcccaccttctgccgccgccaccacagccaccttctcctcctccgctgtcctctcccgtcctcgcctctgtcgactatcaggtgaactttgaaccaggatggctgagccccgccaggagttcgaagtgatggaagatcacgctgggacgtacgggttgggggacaggaaagatcaggggggctacaccatgcaccaagaccaagagggtgacacggacgctggcctgaaagaatctcccctgcagacccccactgaggacggatctgaggaaccgggctctgaaacctctgatgctaagagcactccaacagcggaagctgaagaagcaggcattggagacacccccagcctggaagacgaagctgctggtcacgtgacccaagctcgcatggtcagtaaaagcaaagacgggactggaagcgatgacaaaaaagccaagggggctgatggtaaaacgaagatcgccacaccgcggggagcagcccctccaggccagaagggccaggccaacgccaccaggattccagcaaaaaccccgcccgctccaaagacaccacccagctctggtgaacctccaaaatcaggggatcgcagcggctacagcagccccggctccccaggcactcccggcagccgctcccgcaccccgtcccttccaaccccacccacccgggagcccaagaaggtggcagtggtccgtactccacccaagtcgccgtcttccgccaagagccgcctgcagacagcccccgtgcccatgccagacctgaagaatgtcaagtccaagatcggctccactgagaacctgaagcaccagccgggaggcgggaaggtgcaaatagtctacaaaccagttgacctgagcaaggtgacctccaagtgtggctcattaggcaacatccatcataaaccaggaggtggccaggtggaagtaaaatctgagaagcttgacttcaaggacagagtccagtcgaagattgggtccctggacaatatcacccacgtccctggcggaggaaataaaaagattgaaacccacaagctgaccttccgcgagaacgccaaagccaagacagaccacggggcggagatcgtgtacaagtcgccagtggtgtctggggacacgtctccacggcatctcagcaatgtctcctccaccggcagcatcgacatggtagactcgccccagctcgccacgctagctgacgaggtgtctgcctccctggccaagcagggtttgtgatcaggcccctggggcggtcaataattgtggagaggagagaatgagagagtgtggaaaaaaaaagaataatgacccggcccccgccctctgcccccagctgctcctcgcagttcggttaattggttaatcacttaacctgcttttgtcactcggctttggctcgggacttcaaaatcagtgatgggagtaagagcaaatttcatctttccaaattgatgggtgggctagtaataaaatatttaaaaaaaaacattcaaaaacatggccacatccaacatttcctcaggcaattccttttgattcttttttcttccccctccatgtagaagagggagaaggagaggctctgaaagctgcttctgggggatttcaagggactgggggtgccaaccacctctggccctgttgtgggggtgtcacagaggcagtggcagcaacaaaggatttgaaacttggtgtgttcgtggagccacaggcagacgatgtcaaccttgtgtgagtgtgacgggggttggggtggggcgggaggccacgggggaggccgaggcaggggctgggcagaggggagaggaagcacaagaagtgggagtgggagaggaagccacgtgctggagagtagacatccccctccttgccgctgggagagccaaggcctatgccacctgcagcgtctgagcggccgcctgtccttggtggccgggggtgggggcctgctgtgggtcagtgtgccaccctctgcagggcagcctgtgggagaagggacagcgggtaaaaagagaaggcaagctggcaggagggtggcacttcgtggatgacctccttagaaaagactgaccttgatgtcttgagagcgctggcctcttcctccctccctgcagggtagggggcctgagttgaggggcttccctctgctccacagaaaccctgttttattgagttctgaaggttggaactgctgccatgattttggccactttgcagacctgggactttagggctaaccagttctctttgtaaggacttgtgcctcttgggagacgtccacccgtttccaagcctgggccactggcatctctggagtgtgtgggggtctgggaggcaggtcccgagccccctgtccttcccacggccactgcagtcaccccgtctgcgccgctgtgctgttgtctgccgtgagagcccaatcactgcctatacccctcatcacacgtcacaatgtcccgaattcccagcctcaccaccccttctcagtaatgaccctggttggttgcaggaggtacctactccatactgagggtgaaattaagggaaggcaaagtccaggcacaagagtgggaccccagcctctcactctcagttccactcatccaactgggaccctcaccacgaatctcatgatctgattcggttccctgtctcctcctcccgtcacagatgtgagccagggcactgctcagctgtgaccctaggtgtttctgccttgttgacatggagagagccctttcccctgagaaggcctggccccttcctgtgctgagcccacagcagcaggctgggtgtcttggttgtcagtggtggcaccaggatggaagggcaaggcacccagggcaggcccacagtcccgctgtcccccacttgcaccctagcttgtagctgccaacctcccagacagcccagcccgctgctcagctccacatgcatagtatcagccctccacacccgacaaaggggaacacacccccttggaaatggttcttttcccccagtcccagctggaagccatgctgtctgttctgctggagcagctgaacatatacatagatgttgccctgccctccccatctgcaccctgttgagttgtagttggatttgtctgtttatgcttggattcaccagagtgactatgatagtgaaaagaaaaaaaaaaaaaaaaaaggacgcatgtatcttgaaatgcttgtaaagaggtttctaacccaccctcacgaggtgtctctcacccccacactgggactcgtgtggcctgtgtggtgccaccctgctggggcctcccaagttttgaaaggctttcctcagcacctgggacccaacagagaccagcttctagcagctaaggaggccgttcagctgtgacgaaggcctgaagcacaggattaggactgaagcgatgatgtccccttccctacttccccttggggctccctgtgtcagggcacagactaggtcttgtggctggtctggcttgcggcgcgaggatggttctctctggtcatagcccgaagtctcatggcagtcccaaaggaggcttacaactcctgcatcacaagaaaaaggaagccactgccagctggggggatctgcagctcccagaagctccgtgagcctcagccacccctcagactgggttcctctccaagctcgccctctggaggggcagcgcagcctcccaccaagggccctgcgaccacagcagggattgggatgaattgcctgtcctggatctgctctagaggcccaagctgcctgcctgaggaaggatgacttgacaagtcaggagacactgttcccaaagccttgaccagagcacctcagcccgctgaccttgcacaaactccatctgctgccatgagaaaagggaagccgcctttgcaaaacattgctgcctaaagaaactcagcagcctcaggcccaattctgccacttctggtttgggtacagttaaaggcaaccctgagggacttggcagtagaaatccagggcctcccctggggctggcagcttcgtgtgcagctagagctttacctgaaaggaagtctctgggcccagaactctccaccaagagcctccctgccgttcgctgagtcccagcaattctcctaagttgaagggatctgagaaggagaaggaaatgtggggtagatttggtggtggttagagatatgcccccctcattactgccaacagtttcggctgcatttcttcacgcacctcggttcctcttcctgaagttcttgtgccctgctcttcagcaccatgggccttcttatacggaaggctctgggatctcccccttgtggggcaggctcttggggccagcctaagatcatggtttagggtgatcagtgctggcagataaattgaaaaggcacgctggcttgtgatcttaaatgaggacaatccccccagggctgggcactcctcccctcccctcacttctcccacctgcagagccagtgtccttgggtgggctagataggatatactgtatgccggctccttcaagctgctgactcactttatcaatagttccatttaaattgacttcagtggtgagactgtatcctgtttgctattgcttgttgtgctatggggggaggggggaggaatgtgtaagatagttaacatgggcaaagggagatcttggggtgcagcacttaaactgcctcgtaacccttttcatgatttcaaccacatttgctagagggagggagcagccacggagttagaggcccttggggtttctcttttccactgacaggctttcccaggcagctggctagttcattccctccccagccaggtgcaggcgtaggaatatggacatctggttgctttggcctgctgccctctttcaggggtcctaagcccacaatcatgcctccctaagaccttggcatccttccctctaagccgttggcacctctgtgccacctctcacactggctccagacacacagcctgtgcttttggagctgagatcactcgcttcaccctcctcatctttgttctccaagtaaagccacgaggtcggggcgagggcagaggtgatcacctgcgtgtcccatctacagacctgcagcttcataaaacttctgatttctcttcagctttgaaaagggttaccctgggcactggcctagagcctcacctcctaatagacttagccccatgagtttgccatgttgagcaggactatttctggcacttgcaagtcccatgatttcttcggtaattctgagggtggggggagggacatgaaatcatcttagcttagctttctgtctgtgaatgtctatatagtgtattgtgtgttttaacaaatgatttacactgactgttgctgtaaaagtgaatttggaaataaagttattactctgattaaa

SEQ ID NO: 3951 - DNA, 5718 bp, Homo sapiens
  source 1..5718: mol_type = genomic DNA
ggacggccgagcggcagggcgctcgcgcgcgcccactagtggccggaggagaaggctcccgcggaggccgcgctgcccgccccctcccctggggaggctcgcgttcccgctgctcgcgcctgcgccgcccgccggcctcaggaacgcgccctcttcgccggcgcgcgccctcgcagtcaccgccacccaccagctccggcaccaacagcagcgccgctgccaccgcccaccttctgccgccgccaccacagccaccttctcctcctccgctgtcctctcccgtcctcgcctctgtcgactatcaggtgaactttgaaccaggatggctgagccccgccaggagttcgaagtgatggaagatcacgctgggacgtacgggttgggggacaggaaagatcaggggggctacaccatgcaccaagaccaagagggtgacacggacgctggcctgaaagaatctcccctgcagacccccactgaggacggatctgaggaaccgggctctgaaacctctgatgctaagagcactccaacagcggaagatgtgacagcacccttagtggatgagggagctcccggcaagcaggctgccgcgcagccccacacggagatcccagaaggaaccacagctgaagaagcaggcattggagacacccccagcctggaagacgaagctgctggtcacgtgacccaagctcgcatggtcagtaaaagcaaagacgggactggaagcgatgacaaaaaagccaagggggctgatggtaaaacgaagatcgccacaccgcggggagcagcccctccaggccagaagggccaggccaacgccaccaggattccagcaaaaaccccgcccgctccaaagacaccacccagctctggtgaacctccaaaatcaggggatcgcagcggctacagcagccccggctccccaggcactcccggcagccgctcccgcaccccgtcccttccaaccccacccacccgggagcccaagaaggtggcagtggtccgtactccacccaagtcgccgtcttccgccaagagccgcctgcagacagcccccgtgcccatgccagacctgaagaatgtcaagtccaagatcggctccactgagaacctgaagcaccagccgggaggcgggaaggtgcaaatagtctacaaaccagttgacctgagcaaggtgacctccaagtgtggctcattaggcaacatccatcataaaccaggaggtggccaggtggaagtaaaatctgagaagcttgacttcaaggacagagtccagtcgaagattgggtccctggacaatatcacccacgtccctggcggaggaaataaaaagattgaaacccacaagctgaccttccgcgagaacgccaaagccaagacagaccacggggcggagatcgtgtacaagtcgccagtggtgtctggggacacgtctccacggcatctcagcaatgtctcctccaccggcagcatcgacatggtagactcgccccagctcgccacgctagctgacgaggtgtctgcctccctggccaagcagggtttgtgatcaggcccctggggcggtcaataattgtggagaggagagaatgagagagtgtggaaaaaaaaagaataatgacccggcccccgccctctgcccccagctgctcctcgcagttcggttaattggttaatcacttaacctgcttttgtcactcggctttggctcgggacttcaaaatcagtgatgggagtaagagcaaatttcatctttccaaattgatgggtgggctagtaataaaatatttaaaaaaaaacattcaaaaacatggccacatccaacatttcctcaggcaattccttttgattcttttttcttccccctccatgtagaagagggagaaggagaggctctgaaagctgcttctgggggatttcaagggactgggggtgccaaccacctctggccctgttgtgggggtgtcacagaggcagtggcagcaacaaaggatttgaaacttggtgtgttcgtggagccacaggcagacgatgtcaaccttgtgtgagtgtgacgggggttggggtggggcgggaggccacgggggaggccgaggcaggggctgggcagaggggagaggaagcacaagaagtgggagtgggagaggaagccacgtgctggagagtagacatccccctccttgccgctgggagagccaaggcctatgccacctgcagcgtctgagcggccgcctgtccttggtggccgggggtgggggcctgctgtgggtcagtgtgccaccctctgcagggcagcctgtgggagaagggacagcgggtaaaaagagaaggcaagctggcaggagggtggcacttcgtggatgacctccttagaaaagactgaccttgatgtcttgagagcgctggcctcttcctccctccctgcagggtagggggcctgagttgaggggcttccctctgctccacagaaaccctgttttattgagttctgaaggttggaactgctgccatgattttggccactttgcagacctgggactttagggctaaccagttctctttgtaaggacttgtgcctcttgggagacgtccacccgtttccaagcctgggccactggcatctctggagtgtgtgggggtctgggaggcaggtcccgagccccctgtccttcccacggccactgcagtcaccccgtctgcgccgctgtgctgttgtctgccgtgagagcccaatcactgcctatacccctcatcacacgtcacaatgtcccgaattcccagcctcaccaccccttctcagtaatgaccctggttggttgcaggaggtacctactccatactgagggtgaaattaagggaaggcaaagtccaggcacaagagtgggaccccagcctctcactctcagttccactcatccaactgggaccctcaccacgaatctcatgatctgattcggttccctgtctcctcctcccgtcacagatgtgagccagggcactgctcagctgtgaccctaggtgtttctgccttgttgacatggagagagccctttcccctgagaaggcctggccccttcctgtgctgagcccacagcagcaggctgggtgtcttggttgtcagtggtggcaccaggatggaagggcaaggcacccagggcaggcccacagtcccgctgtcccccacttgcaccctagcttgtagctgccaacctcccagacagcccagcccgctgctcagctccacatgcatagtatcagccctccacacccgacaaaggggaacacacccccttggaaatggttcttttcccccagtcccagctggaagccatgctgtctgttctgctggagcagctgaacatatacatagatgttgccctgccctccccatctgcaccctgttgagttgtagttggatttgtctgtttatgcttggattcaccagagtgactatgatagtgaaaagaaaaaaaaaaaaaaaaaaggacgcatgtatcttgaaatgcttgtaaagaggtttctaacccaccctcacgaggtgtctctcacccccacactgggactcgtgtggcctgtgtggtgccaccctgctggggcctcccaagttttgaaaggctttcctcagcacctgggacccaacagagaccagcttctagcagctaaggaggccgttcagctgtgacgaaggcctgaagcacaggattaggactgaagcgatgatgtccccttccctacttccccttggggctccctgtgtcagggcacagactaggtcttgtggctggtctggcttgcggcgcgaggatggttctctctggtcatagcccgaagtctcatggcagtcccaaaggaggcttacaactcctgcatcacaagaaaaaggaagccactgccagctggggggatctgcagctcccagaagctccgtgagcctcagccacccctcagactgggttcctctccaagctcgccctctggaggggcagcgcagcctcccaccaagggccctgcgaccacagcagggattgggatgaattgcctgtcctggatctgctctagaggcccaagctgcctgcctgaggaaggatgacttgacaagtcaggagacactgttcccaaagccttgaccagagcacctcagcccgctgaccttgcacaaactccatctgctgccatgagaaaagggaagccgcctttgcaaaacattgctgcctaaagaaactcagcagcctcaggcccaattctgccacttctggtttgggtacagttaaaggcaaccctgagggacttggcagtagaaatccagggcctcccctggggctggcagcttcgtgtgcagctagagctttacctgaaaggaagtctctgggcccagaactctccaccaagagcctccctgccgttcgctgagtcccagcaattctcctaagttgaagggatctgagaaggagaaggaaatgtggggtagatttggtggtggttagagatatgcccccctcattactgccaacagtttcggctgcatttcttcacgcacctcggttcctcttcctgaagttcttgtgccctgctcttcagcaccatgggccttcttatacggaaggctctgggatctcccccttgtggggcaggctcttggggccagcctaagatcatggtttagggtgatcagtgctggcagataaattgaaaaggcacgctggcttgtgatcttaaatgaggacaatccccccagggctgggcactcctcccctcccctcacttctcccacctgcagagccagtgtccttgggtgggctagataggatatactgtatgccggctccttcaagctgctgactcactttatcaatagttccatttaaattgacttcagtggtgagactgtatcctgtttgctattgcttgttgtgctatggggggaggggggaggaatgtgtaagatagttaacatgggcaaagggagatcttggggtgcagcacttaaactgcctcgtaacccttttcatgatttcaaccacatttgctagagggagggagcagccacggagttagaggcccttggggtttctcttttccactgacaggctttcccaggcagctggctagttcattccctccccagccaggtgcaggcgtaggaatatggacatctggttgctttggcctgctgccctctttcaggggtcctaagcccacaatcatgcctccctaagaccttggcatccttccctctaagccgttggcacctctgtgccacctctcacactggctccagacacacagcctgtgcttttggagctgagatcactcgcttcaccctcctcatctttgttctccaagtaaagccacgaggtcggggcgagggcagaggtgatcacctgcgtgtcccatctacagacctgcagcttcataaaacttctgatttctcttcagctttgaaaagggttaccctgggcactggcctagagcctcacctcctaatagacttagccccatgagtttgccatgttgagcaggactatttctggcacttgcaagtcccatgatttcttcggtaattctgagggtggggggagggacatgaaatcatcttagcttagctttctgtctgtgaatgtctatatagtgtattgtgtgttttaacaaatgatttacactgactgttgctgtaaaagtgaatttggaaataaagttattactctgattaaa

SEQ ID NO: 3952 - DNA, 21 bp, synthetic construct
  source 1..21: mol_type = other DNA
  misc_feature 1..19: note = RNA
  misc_feature 20..21: note = DNA
tgaagtcccgagccaaagctt

SEQ ID NO: 3953 - DNA, 21 bp, synthetic construct
  source 1..21: mol_type = other DNA
  misc_feature 1..19: note = RNA
  misc_feature 20..21: note = DNA
tggcgagtctaccatgtcgtt

SEQ ID NO: 3954 - DNA, 21 bp, synthetic construct
  source 1..21: mol_type = other DNA
  misc_feature 1..19: note = RNA
  misc_feature 20..21: note = DNA
ttaaccgaactgcgaggagtt

SEQ ID NO: 3955 - DNA, 21 bp, synthetic construct
  source 1..21: mol_type = other DNA
  misc_feature 1..19: note = RNA
  misc_feature 20..21: note = DNA
taagtcccgagccaaagcctt

SEQ ID NO: 3956 - DNA, 21 bp, synthetic construct
  source 1..21: mol_type = other DNA
  misc_feature 1..19: note = RNA
  misc_feature 20..21: note = DNA
tagtctaccatgtcgatgctt

SEQ ID NO: 3957 - DNA, 21 bp, synthetic construct
  source 1..21: mol_type = other DNA
  misc_feature 1..19: note = RNA
  misc_feature 20..21: note = DNA
taccgaactgcgaggagcatt

SEQ ID NO: 3958 - DNA, 21 bp, synthetic construct
  source 1..21: mol_type = other DNA
  misc_feature 1..19: note = RNA
  misc_feature 20..21: note = DNA
taagacggcgacttgggtgtt

SEQ ID NO: 3959 - DNA, 21 bp, synthetic construct
  source 1..21: mol_type = other DNA
  misc_feature 1..19: note = RNA
  misc_feature 20..21: note = DNA
tattaaccgaactgcgaggtt

SEQ ID NO: 3960 - DNA, 21 bp, synthetic construct
  source 1..21: mol_type = other DNA
  misc_feature 1..19: note = RNA
  misc_feature 20..21: note = DNA
tttaaccgaactgcgaggatt

SEQ ID NO: 3961 - DNA, 21 bp, synthetic construct
  source 1..21: mol_type = other DNA
  misc_feature 1..19: note = RNA
  misc_feature 20..21: note = DNA
ttctcgcggaaggtcagcttt

SEQ ID NO: 3962 - DNA, 21 bp, synthetic construct
  source 1..21: mol_type = other DNA
  misc_feature 1..19: note = RNA
  misc_feature 20..21: note = DNA
tttgtcatcgcttccagtctt

SEQ ID NO: 3963 - DNA, 21 bp, synthetic construct
  source 1..21: mol_type = other DNA
  misc_feature 1..19: note = RNA
  misc_feature 20..21: note = DNA
tttactgaccatgcgagcttt

SEQ ID NO: 3964 - DNA, 21 bp, synthetic construct
  source 1..21: mol_type = other DNA
  misc_feature 1..19: note = RNA
  misc_feature 20..21: note = DNA
ttcaactggtttgtagacttt

SEQ ID NO: 3965 - DNA, 21 bp, synthetic construct
  source 1..21: mol_type = other DNA
  misc_feature 1..19: note = RNA
  misc_feature 20..21: note = DNA
taaccgaactgcgaggagctt

SEQ ID NO: 3966 - DNA, 21 bp, synthetic construct
  source 1..21: mol_type = other DNA
  misc_feature 1..19: note = RNA
  misc_feature 20..21: note = DNA
tttggcgttctcgcggaagtt

SEQ ID NO: 3967 - DNA, 21 bp, synthetic construct
  source 1..21: mol_type = other DNA
  misc_feature 1..19: note = RNA
  misc_feature 20..21: note = DNA
ttactcccatcactgattttt

SEQ ID NO: 3968 - DNA, 21 bp, synthetic construct
  source 1..21: mol_type = other DNA
  misc_feature 1..19: note = RNA
  misc_feature 20..21: note = DNA
tttggcggaagacggcgactt

SEQ ID NO: 3969 - DNA, 21 bp, synthetic construct
  source 1..21: mol_type = other DNA
  misc_feature 1..19: note = RNA
  misc_feature 20..21: note = DNA
tcgatcttcgttttaccattt

SEQ ID NO: 3970 - DNA, 21 bp, synthetic construct
  source 1..21: mol_type = other DNA
  misc_feature 1..19: note = RNA
  misc_feature 20..21: note = DNA
tcggtgtggcgatcttcgttt

SEQ ID NO: 3971 - DNA, 21 bp, synthetic construct
  source 1..21: mol_type = other DNA
  misc_feature 1..19: note = RNA
  misc_feature 20..21: note = DNA
tccaattaaccgaactgcgtt

SEQ ID NO: 3972 - DNA, 21 bp, synthetic construct
  source 1..21: mol_type = other DNA
  misc_feature 1..19: note = RNA
  misc_feature 20..21: note = DNA
tgcgacttgggtggagtactt

SEQ ID NO: 3973 - DNA, 21 bp, synthetic construct
  source 1..21: mol_type = other DNA
  misc_feature 1..19: note = RNA
  misc_feature 20..21: note = DNA
ttcccgagccaaagccgagtt

SEQ ID NO: 3974 - DNA, 21 bp, synthetic construct
  source 1..21: mol_type = other DNA
  misc_feature 1..19: note = RNA
  misc_feature 20..21: note = DNA
tattgaccgccccaggggctt

SEQ ID NO: 3975 - DNA, 21 bp, synthetic construct
  source 1..21: mol_type = other DNA
  misc_feature 1..19: note = RNA
  misc_feature 20..21: note = DNA
taattaaccgaactgcgagtt

SEQ ID NO: 3976 - DNA, 21 bp, synthetic construct
  source 1..21: mol_type = other DNA
  misc_feature 1..19: note = RNA
  misc_feature 20..21: note = DNA
tcttggcggaagacggcgatt

SEQ ID NO: 3977 - DNA, 21 bp, synthetic construct
  source 1..21: mol_type = other DNA
  misc_feature 1..19: note = RNA
  misc_feature 20..21: note = DNA
tatcgcttccagtcccgtctt

SEQ ID NO: 3978 - DNA, 21 bp, synthetic construct
  source 1..21: mol_type = other DNA
  misc_feature 1..19: note = RNA
  misc_feature 20..21: note = DNA
tgcgatcttcgttttaccatt

SEQ ID NO: 3979 - DNA, 21 bp, synthetic construct
  source 1..21: mol_type = other DNA
  misc_feature 1..19: note = RNA
  misc_feature 20..21: note = DNA
ttggcgatcttcgttttactt

SEQ ID NO: 3980 - DNA, 21 bp, synthetic construct
  source 1..21: mol_type = other DNA
  misc_feature 1..19: note = RNA
  misc_feature 20..21: note = DNA
tggacgtgggtgatattgttt

SEQ ID NO: 3981 - DNA, 21 bp, synthetic construct
  source 1..21: mol_type = other DNA
  misc_feature 1..19: note = RNA
  misc_feature 20..21: note = DNA
ttggcgttctcgcggaaggtt

SEQ ID NO: 3982 - DNA, 21 bp, synthetic construct
  source 1..21: mol_type = other DNA
  misc_feature 1..19: note = RNA
  misc_feature 20..21: note = DNA
tgttttaccatcagccccctt

SEQ ID NO: 3983 - DNA, 21 bp, synthetic construct
  source 1..21: mol_type = other DNA
  misc_feature 1..19: note = RNA
  misc_feature 20..21: note = DNA
tctcttggcggaagacggctt

SEQ ID NO: 3984 - DNA, 21 bp, synthetic construct
  source 1..21: mol_type = other DNA
  misc_feature 1..19: note = RNA
  misc_feature 20..21: note = DNA
tatgtcgatgctgccggtgtt

SEQ ID NO: 3985 - DNA, 21 bp, synthetic construct
  source 1..21: mol_type = other DNA
  misc_feature 1..19: note = RNA
  misc_feature 20..21: note = DNA
ttcccgtctttgcttttactt

SEQ ID NO: 3986 - DNA, 21 bp, synthetic construct
  source 1..21: mol_type = other DNA
  misc_feature 1..19: note = RNA
  misc_feature 20..21: note = DNA
tagggtgggttagaaaccttt

SEQ ID NO: 3987 - DNA, 21 bp, synthetic construct
  source 1..21: mol_type = other DNA
  misc_feature 1..19: note = RNA
  misc_feature 20..21: note = DNA
ttttggcgttctcgcggaatt

SEQ ID NO: 3988 - DNA, 21 bp, synthetic construct
  source 1..21: mol_type = other DNA
  misc_feature 1..19: note = RNA
  misc_feature 20..21: note = DNA
tgcgttctcgcggaaggtctt

SEQ ID NO: 3989 - DNA, 21 bp, synthetic construct
  source 1..21: mol_type = other DNA
  misc_feature 1..19: note = RNA
  misc_feature 20..21: note = DNA
ttcgtcagctagcgtggcgtt

SEQ ID NO: 3990 - DNA, 21 bp, synthetic construct
  source 1..21: mol_type = other DNA
  misc_feature 1..19: note = RNA
  misc_feature 20..21: note = DNA
ttagatgggacacgcaggttt

SEQ ID NO: 3991 - DNA, 21 bp, synthetic construct
  source 1..21: mol_type = other DNA
  misc_feature 1..19: note = RNA
  misc_feature 20..21: note = DNA
ttagcgtggcgagctggggtt

SEQ ID NO: 3992 - DNA, 21 bp, synthetic construct
  source 1..21: mol_type = other DNA
  misc_feature 1..19: note = RNA
  misc_feature 20..21: note = DNA
ttcgtcacagctgaacggctt

SEQ ID NO: 3993 - DNA, 21 bp, synthetic construct
  source 1..21: mol_type = other DNA
  misc_feature 1..19: note = RNA
  misc_feature 20..21: note = DNA
tcttcgttttaccatcagctt

SEQ ID NO: 3994 - DNA, 21 bp, synthetic construct
  source 1..21: mol_type = other DNA
  misc_feature 1..19: note = RNA
  misc_feature 20..21: note = DNA
tgggtgagagacacctcgttt

SEQ ID NO: 3995 - DNA, 21 bp, synthetic construct
  source 1..21: mol_type = other DNA
  misc_feature 1..19: note = RNA
  misc_feature 20..21: note = DNA
tatgatcttaggctggccctt

SEQ ID NO: 3996 - DNA, 21 bp, synthetic construct
  source 1..21: mol_type = other DNA
  misc_feature 1..19: note = RNA
  misc_feature 20..21: note = DNA
ttcgtgagggtgggttagatt

SEQ ID NO: 3997 - DNA, 21 bp, synthetic construct
  source 1..21: mol_type = other DNA
  misc_feature 1..19: note = RNA
  misc_feature 20..21: note = DNA
tgggttagaaacctctttatt

SEQ ID NO: 3998 - DNA, 21 bp, synthetic construct
  source 1..21: mol_type = other DNA
  misc_feature 1..19: note = RNA
  misc_feature 20..21: note = DNA
tagtctattaggaggtgagtt

SEQ ID NO: 3999 - DNA, 21 bp, synthetic construct
  source 1..21: mol_type = other DNA
  misc_feature 1..19: note = RNA
  misc_feature 20..21: note = DNA
tccggcatacagtatatcctt

SEQ ID NO: 4000 - DNA, 21 bp, synthetic construct
  source 1..21: mol_type = other DNA
  misc_feature 1..19: note = RNA
  misc_feature 20..21: note = DNA
tagacacctcgtgagggtgtt

SEQ ID NO: 4001 - DNA, 21 bp, synthetic construct
  source 1..21: mol_type = other DNA
  misc_feature 1..19: note = RNA
  misc_feature 20..21: note = DNA
tacctcgtcagctagcgtgtt

SEQ ID NO: 4002 - DNA, 21 bp, synthetic construct
  source 1..21: mol_type = other DNA
  misc_feature 1..19: note = RNA
  misc_feature 20..21: note = DNA
taccgaagaaatcatgggatt

SEQ ID NO: 4003 - DNA, 21 bp, synthetic construct
  source 1..21: mol_type = other DNA
  misc_feature 1..19: note = RNA
  misc_feature 20..21: note = DNA
taatccaactacaactcaatt

SEQ ID NO: 4004 - DNA, 21 bp, synthetic construct
  source 1..21: mol_type = other DNA
  misc_feature 1..19: note = RNA
  misc_feature 20..21: note = DNA
ttgtagatgggacacgcagtt

SEQ ID NO: 4005 - DNA, 21 bp, synthetic construct
  source 1..21: mol_type = other DNA
  misc_feature 1..19: note = RNA
  misc_feature 20..21: note = DNA
tatccaactacaactcaactt

SEQ ID NO: 4006 - DNA, 21 bp, synthetic construct
  source 1..21: mol_type = other DNA
  misc_feature 1..19: note = RNA
  misc_feature 20..21: note = DNA
tatatctctaaccaccacctt

SEQ ID NO: 4007 - DNA, 21 bp, synthetic construct
  source 1..21: mol_type = other DNA
  misc_feature 1..19: note = RNA
  misc_feature 20..21: note = DNA
tgtatatcctatctagccctt

SEQ ID NO: 4008 - DNA, 21 bp, synthetic construct
  source 1..21: mol_type = other DNA
  misc_feature 1..19: note = RNA
  misc_feature 20..21: note = DNA
tggtttttgctggaatccttt

SEQ ID NO: 4009 - DNA, 21 bp, synthetic construct
  source 1..21: mol_type = other DNA
  misc_feature 1..19: note = RNA
  misc_feature 20..21: note = DNA
tttgaccgccccaggggcctt

SEQ ID NO: 4010 - DNA, 21 bp, synthetic construct
  source 1..21: mol_type = other DNA
  misc_feature 1..19: note = RNA
  misc_feature 20..21: note = DNA
tatcgcttcagtcctaatctt

SEQ ID NO: 4011 - DNA, 21 bp, synthetic construct
  source 1..21: mol_type = other DNA
  misc_feature 1..19: note = RNA
  misc_feature 20..21: note = DNA
tcctttcaaaacttgggagtt

SEQ ID NO: 4012 - DNA, 21 bp, synthetic construct
  source 1..21: mol_type = other DNA
  misc_feature 1..19: note = RNA
  misc_feature 20..21: note = DNA
tgccgcaagccagaccagctt

SEQ ID NO: 4013 - DNA, 21 bp, synthetic construct
  source 1..21: mol_type = other DNA
  misc_feature 1..19: note = RNA
  misc_feature 20..21: note = DNA
tcagttggatgagtggaactt

SEQ ID NO: 4014 - DNA, 21 bp, synthetic construct
  source 1..21: mol_type = other DNA
  misc_feature 1..19: note = RNA
  misc_feature 20..21: note = DNA
ttaagtctattaggaggtgtt

SEQ ID NO: 4015 - DNA, 21 bp, synthetic construct
  source 1..21: mol_type = other DNA
  misc_feature 1..19: note = RNA
  misc_feature 20..21: note = DNA
tcgtgagggtgggttagaatt

SEQ ID NO: 4016 - DNA, 21 bp, synthetic construct
  source 1..21: mol_type = other DNA
  misc_feature 1..19: note = RNA
  misc_feature 20..21: note = DNA
taggcatgattgtgggctttt

SEQ ID NO: 4017 - DNA, 21 bp, synthetic construct
  source 1..21: mol_type = other DNA
  misc_feature 1..19: note = RNA
  misc_feature 20..21: note = DNA
tggcgttctcgcggaaggttt

SEQ ID NO: 4018 - DNA, 21 bp, synthetic construct
  source 1..21: mol_type = other DNA
  misc_feature 1..19: note = RNA
  misc_feature 20..21: note = DNA
tttgggtcacgtgaccagctt

SEQ ID NO: 4019 - DNA, 21 bp, synthetic construct
  source 1..21: mol_type = other DNA
  misc_feature 1..19: note = RNA
  misc_feature 20..21: note = DNA
tcctcgtgagggtgggttatt

SEQ ID NO: 4020 - DNA, 21 bp, synthetic construct
  source 1..21: mol_type = other DNA
  misc_feature 1..19: note = RNA
  misc_feature 20..21: note = DNA
ttgatgcaggagttgtaagtt

SEQ ID NO: 4021 - DNA, 21 bp, synthetic construct
  source 1..21: mol_type = other DNA
  misc_feature 1..19: note = RNA
  misc_feature 20..21: note = DNA
tgttagccctaaagtcccatt

SEQ ID NO: 4022 - DNA, 21 bp, synthetic construct
  source 1..21: mol_type = other DNA
  misc_feature 1..19: note = RNA
  misc_feature 20..21: note = DNA
tacatcgtctgcctgtggctt

SEQ ID NO: 4023 - DNA, 21 bp, synthetic construct
  source 1..21: mol_type = other DNA
  misc_feature 1..19: note = RNA
  misc_feature 20..21: note = DNA
tggacgtctcccaagaggctt

SEQ ID NO: 4024 - DNA, 21 bp, synthetic construct
  source 1..21: mol_type = other DNA
  misc_feature 1..19: note = RNA
  misc_feature 20..21: note = DNA
tatgaggggggcatatctctt

SEQ ID NO: 4025 - DNA, 21 bp, synthetic construct
  source 1..21: mol_type = other DNA
  misc_feature 1..19: note = RNA
  misc_feature 20..21: note = DNA
tgcctttcaaaacttgggatt

SEQ ID NO: 4026 - DNA, 21 bp, synthetic construct
  source 1..21: mol_type = other DNA
  misc_feature 1..19: note = RNA
  misc_feature 20..21: note = DNA
tttaatcagagtaataacttt

SEQ ID NO: 4027 - DNA, 21 bp, synthetic construct
  source 1..21: mol_type = other DNA
  misc_feature 1..19: note = RNA
  misc_feature 20..21: note = DNA
tagtaatgaggggggcatatt

SEQ ID NO: 4028 - DNA, 21 bp, synthetic construct
  source 1..21: mol_type = other DNA
  misc_feature 1..19: note = RNA
  misc_feature 20..21: note = DNA
ttgcgatcccctgattttgtt

SEQ ID NO: 4029 - DNA, 21 bp, synthetic construct
  source 1..21: mol_type = other DNA
  misc_feature 1..19: note = RNA
  misc_feature 20..21: note = DNA
ttctccgccccgtggtctgtt

SEQ ID NO: 4030 - DNA, 21 bp, synthetic construct
  source 1..21: mol_type = other DNA
  misc_feature 1..19: note = RNA
  misc_feature 20..21: note = DNA
tctatctagcccacccaagtt

SEQ ID NO: 4031 - DNA, 21 bp, synthetic construct
  source 1..21: mol_type = other DNA
  misc_feature 1..19: note = RNA
  misc_feature 20..21: note = DNA
tgtcagctagcgtggcgagtt

SEQ ID NO: 4032 - DNA, 21 bp, synthetic construct
  source 1..21: mol_type = other DNA
  misc_feature 1..19: note = RNA
  misc_feature 20..21: note = DNA
ttccaactacaactcaacatt

SEQ ID NO: 4033 - DNA, 21 bp, synthetic construct
  source 1..21: mol_type = other DNA
  misc_feature 1..19: note = RNA
  misc_feature 20..21: note = DNA
tgggcaacatctatgtatatt

SEQ ID NO: 4034 - DNA, 21 bp, synthetic construct
  source 1..21: mol_type = other DNA
  misc_feature 1..19: note = RNA
  misc_feature 20..21: note = DNA
tacctcgtgagggtgggtttt

SEQ ID NO: 4035 - DNA, 21 bp, synthetic construct
  source 1..21: mol_type = other DNA
  misc_feature 1..19: note = RNA
  misc_feature 20..21: note = DNA
tgaaatagtcctgctcaactt

SEQ ID NO: 4036 - DNA, 21 bp, synthetic construct
  source 1..21: mol_type = other DNA
  misc_feature 1..19: note = RNA
  misc_feature 20..21: note = DNA
tcctcgtcagctagcgtggtt

SEQ ID NO: 4037 - DNA, 21 bp, synthetic construct
  source 1..21: mol_type = other DNA
  misc_feature 1..19: note = RNA
  misc_feature 20..21: note = DNA
tggctaagtctattaggagtt

SEQ ID NO: 4038 - DNA, 21 bp, synthetic construct
  source 1..21: mol_type = other DNA
  misc_feature 1..19: note = RNA
  misc_feature 20..21: note = DNA
tagaattaccgaagaaatctt

SEQ ID NO: 4039 - DNA, 21 bp, synthetic construct
  source 1..21: mol_type = other DNA
  misc_feature 1..19: note = RNA
  misc_feature 20..21: note = DNA
tgtaagcctcctttgggactt

SEQ ID NO: 4040 - DNA, 21 bp, synthetic construct
  source 1..21: mol_type = other DNA
  misc_feature 1..19: note = RNA
  misc_feature 20..21: note = DNA
tggcatatctctaaccacctt

SEQ ID NO: 4041 - DNA, 21 bp, synthetic construct
  source 1..21: mol_type = other DNA
  misc_feature 1..19: note = RNA
  misc_feature 20..21: note = DNA
tagtatatcctatctagcctt

SEQ ID NO: 4042 - DNA, 21 bp, synthetic construct
  source 1..21: mol_type = other DNA
  misc_feature 1..19: note = RNA
  misc_feature 20..21: note = DNA
tatagtcactctggtgaattt

SEQ ID NO: 4043 - DNA, 21 bp, synthetic construct
  source 1..21: mol_type = other DNA
  misc_feature 1..19: note = RNA
  misc_feature 20..21: note = DNA
tgccggcatacagtatatctt

SEQ ID NO: 4044 - DNA, 21 bp, synthetic construct
  source 1..21: mol_type = other DNA
  misc_feature 1..19: note = RNA
  misc_feature 20..21: note = DNA
tccaatccctgctgtggtctt

SEQ ID NO: 4045 - DNA, 21 bp, synthetic construct
  source 1..21: mol_type = other DNA
  misc_feature 1..19: note = RNA
  misc_feature 20..21: note = DNA
tatcgtctgcctgtggctctt

SEQ ID NO: 4046 - DNA, 21 bp, synthetic construct
  source 1..21: mol_type = other DNA
  misc_feature 1..19: note = RNA
  misc_feature 20..21: note = DNA
tagacacctcgtcagctagtt

SEQ ID NO: 4047 - DNA, 21 bp, synthetic construct
  source 1..21: mol_type = other DNA
  misc_feature 1..19: note = RNA
  misc_feature 20..21: note = DNA
ttttaccatcagccccctttt

SEQ ID NO: 4048 - DNA, 21 bp, synthetic construct
  source 1..21: mol_type = other DNA
  misc_feature 1..19: note = RNA
  misc_feature 20..21: note = DNA
tccgctgcgatcccctgattt

SEQ ID NO: 4049 - DNA, 21 bp, synthetic construct
  source 1..21: mol_type = other DNA
  misc_feature 1..19: note = RNA
  misc_feature 20..21: note = DNA
tctagcgtggcgagctgggtt

SEQ ID NO: 4050 - DNA, 21 bp, synthetic construct
  source 1..21: mol_type = other DNA
  misc_feature 1..19: note = RNA
  misc_feature 20..21: note = DNA
tcttcgtcacagctgaacgtt

SEQ ID NO: 4051 - DNA, 21 bp, synthetic construct
  source 1..21: mol_type = other DNA
  misc_feature 1..19: note = RNA
  misc_feature 20..21: note = DNA
ttcatgggacttgcaagtgtt

SEQ ID NO: 4052 - DNA, 21 bp, synthetic construct
  source 1..21: mol_type = other DNA
  misc_feature 1..19: note = RNA
  misc_feature 20..21: note = DNA
ttatatcctatctagcccatt

SEQ ID NO: 4053 - DNA, 21 bp, synthetic construct
  source 1..21: mol_type = other DNA
  misc_feature 1..19: note = RNA
  misc_feature 20..21: note = DNA
tggtgaatccaagcataaatt

SEQ ID NO: 4054 - DNA, 21 bp, synthetic construct
  source 1..21: mol_type = other DNA
  misc_feature 1..19: note = RNA
  misc_feature 20..21: note = DNA
tgcgatcccctgattttggtt

SEQ ID NO: 4055 - DNA, 21 bp, synthetic construct
  source 1..21: mol_type = other DNA
  misc_feature 1..19: note = RNA
  misc_feature 20..21: note = DNA
tttcgtcacagctgaacggtt

SEQ ID NO: 4056 - DNA, 21 bp, synthetic construct
  source 1..21: mol_type = other DNA
  misc_feature 1..19: note = RNA
  misc_feature 20..21: note = DNA
tgaaatgttggatgtggcctt

SEQ ID NO: 4057 - DNA, 21 bp, synthetic construct
  source 1..21: mol_type = other DNA
  misc_feature 1..19: note = RNA
  misc_feature 20..21: note = DNA
taatggaactattgataaatt

SEQ ID NO: 4058 - DNA, 21 bp, synthetic construct
  source 1..21: mol_type = other DNA
  misc_feature 1..19: note = RNA
  misc_feature 20..21: note = DNA
tttgtacacgatctccgcctt

SEQ ID NO: 4059 - DNA, 21 bp, synthetic construct
  source 1..21: mol_type = other DNA
  misc_feature 1..19: note = RNA
  misc_feature 20..21: note = DNA
tcgtcagctagcgtggcgatt

SEQ ID NO: 4060 - DNA, 21 bp, synthetic construct
  source 1..21: mol_type = other DNA
  misc_feature 1..19: note = RNA
  misc_feature 20..21: note = DNA
ttcgcgccgcaagccagactt

SEQ ID NO: 4061 - DNA, 21 bp, synthetic construct
  source 1..21: mol_type = other DNA
  misc_feature 1..19: note = RNA
  misc_feature 20..21: note = DNA
tctaagtctattaggaggttt

SEQ ID NO: 4062 - DNA, 21 bp, synthetic construct
  source 1..21: mol_type = other DNA
  misc_feature 1..19: note = RNA
  misc_feature 20..21: note = DNA
taggtctgtagatgggacatt

SEQ ID NO: 4063 - DNA, 21 bp, synthetic construct
  source 1..21: mol_type = other DNA
  misc_feature 1..19: note = RNA
  misc_feature 20..21: note = DNA
tccaccctcagaattaccgtt

SEQ ID NO: 4064 - DNA, 21 bp, synthetic construct
  source 1..21: mol_type = other DNA
  misc_feature 1..19: note = RNA
  misc_feature 20..21: note = DNA
ttcagaattaccgaagaaatt

SEQ ID NO: 4065 - DNA, 21 bp, synthetic construct
  source 1..21: mol_type = other DNA
  misc_feature 1..19: note = RNA
  misc_feature 20..21: note = DNA
ttacaactcaacagggtgctt

SEQ ID NO: 4066 - DNA, 21 bp, synthetic construct
  source 1..21: mol_type = other DNA
  misc_feature 1..19: note = RNA
  misc_feature 20..21: note = DNA
tagccggcatacagtatattt

SEQ ID NO: 4067 - DNA, 21 bp, synthetic construct
  source 1..21: mol_type = other DNA
  misc_feature 1..19: note = RNA
  misc_feature 20..21: note = DNA
ttgtacccaaaccagaagttt

SEQ ID NO: 4068 - DNA, 21 bp, synthetic construct
  source 1..21: mol_type = other DNA
  misc_feature 1..19: note = RNA
  misc_feature 20..21: note = DNA
tgtcctaatcctgtgcttctt

SEQ ID NO: 4069 - DNA, 21 bp, synthetic construct
  source 1..21: mol_type = other DNA
  misc_feature 1..19: note = RNA
  misc_feature 20..21: note = DNA
tgcttaggacccctgaaagtt

SEQ ID NO: 4070 - DNA, 21 bp, synthetic construct
  source 1..21: mol_type = other DNA
  misc_feature 1..19: note = RNA
  misc_feature 20..21: note = DNA
ttaatgaggggggcatatctt

SEQ ID NO: 4071 - DNA, 21 bp, synthetic construct
  source 1..21: mol_type = other DNA
  misc_feature 1..19: note = RNA
  misc_feature 20..21: note = DNA
tgctgaacggcctccttagtt

SEQ ID NO: 4072 - DNA, 21 bp, synthetic construct
  source 1..21: mol_type = other DNA
  misc_feature 1..19: note = RNA
  misc_feature 20..21: note = DNA
ttccaagggggtgtgttcctt

SEQ ID NO: 4073 - DNA, 21 bp, synthetic construct
  source 1..21: mol_type = other DNA
  misc_feature 1..19: note = RNA
  misc_feature 20..21: note = DNA
tcatgattgtgggcttaggtt

SEQ ID NO: 4074 - DNA, 21 bp, synthetic construct
  source 1..21: mol_type = other DNA
  misc_feature 1..19: note = RNA
  misc_feature 20..21: note = DNA
taaacttgggaggccccagtt

SEQ ID NO: 4075 - DNA, 21 bp, synthetic construct
  source 1..21: mol_type = other DNA
  misc_feature 1..19: note = RNA
  misc_feature 20..21: note = DNA
tgggtgcaagtgggggacatt

SEQ ID NO: 4076 - DNA, 21 bp, synthetic construct
  source 1..21: mol_type = other DNA
  misc_feature 1..19: note = RNA
  misc_feature 20..21: note = DNA
ttaatcagagtaataactttt

SEQ ID NO: 4077 - DNA, 21 bp, synthetic construct
  source 1..21: mol_type = other DNA
  misc_feature 1..19: note = RNA
  misc_feature 20..21: note = DNA
tcatggggctaagtctatttt

SEQ ID NO: 4078 - DNA, 21 bp, synthetic construct
  source 1..21: mol_type = other DNA
  misc_feature 1..19: note = RNA
  misc_feature 20..21: note = DNA
tcaaccagggtcattactgtt

SEQ ID NO: 4079 - DNA, 21 bp, synthetic construct
  source 1..21: mol_type = other DNA
  misc_feature 1..19: note = RNA
  misc_feature 20..21: note = DNA
ttatcttacacattcctcctt

SEQ ID NO: 4080 - DNA, 21 bp, synthetic construct
  source 1..21: mol_type = other DNA
  misc_feature 1..19: note = RNA
  misc_feature 20..21: note = DNA
tcttagggaggcatgattgtt

SEQ ID NO: 4081 - DNA, 21 bp, synthetic construct
  source 1..21: mol_type = other DNA
  misc_feature 1..19: note = RNA
  misc_feature 20..21: note = DNA
tcccagttggatgagtggatt

SEQ ID NO: 4082 - DNA, 21 bp, synthetic construct
  source 1..21: mol_type = other DNA
  misc_feature 1..19: note = RNA
  misc_feature 20..21: note = DNA
tattcctacgcctgcaccttt

SEQ ID NO: 4083 - DNA, 21 bp, synthetic construct
  source 1..21: mol_type = other DNA
  misc_feature 1..19: note = RNA
  misc_feature 20..21: note = DNA
tcatacagtatatcctatctt

SEQ ID NO: 4084 - DNA, 21 bp, synthetic construct
  source 1..21: mol_type = other DNA
  misc_feature 1..19: note = RNA
  misc_feature 20..21: note = DNA
tatgattgtgggcttaggatt

SEQ ID NO: 4085 - DNA, 21 bp, synthetic construct
  source 1..21: mol_type = other DNA
  misc_feature 1..19: note = RNA
  misc_feature 20..21: note = DNA
tcgtcacagctgaacggcctt

SEQ ID NO: 4086 - DNA, 21 bp, synthetic construct
  source 1..21: mol_type = other DNA
  misc_feature 1..19: note = RNA
  misc_feature 20..21: note = DNA
taaatgttggatgtggccatt

SEQ ID NO: 4087 - DNA, 21 bp, synthetic construct
  source 1..21: mol_type = other DNA
  misc_feature 1..19: note = RNA
  misc_feature 20..21: note = DNA
tgccagaaatagtcctgcttt

SEQ ID NO: 4088 - DNA, 21 bp, synthetic construct
  source 1..21: mol_type = other DNA
  misc_feature 1..19: note = RNA
  misc_feature 20..21: note = DNA
tgcaaccagatgtccatattt

SEQ ID NO: 4089 - DNA, 21 bp, synthetic construct
  source 1..21: mol_type = other DNA
  misc_feature 1..19: note = RNA
  misc_feature 20..21: note = DNA
tacaagctagggtgcaagttt

SEQ ID NO: 4090 - DNA, 21 bp, synthetic construct
  source 1..21: mol_type = other DNA
  misc_feature 1..19: note = RNA
  misc_feature 20..21: note = DNA
tggttagaaacctctttactt

SEQ ID NO: 4091 - DNA, 21 bp, synthetic construct
  source 1..21: mol_type = other DNA
  misc_feature 1..19: note = RNA
  misc_feature 20..21: note = DNA
tctattgataaagtgagtctt

SEQ ID NO: 4092 - DNA, 21 bp, synthetic construct
  source 1..21: mol_type = other DNA
  misc_feature 1..19: note = RNA
  misc_feature 20..21: note = DNA
ttaaagtgagtcagcagcttt

SEQ ID NO: 4093 - DNA, 21 bp, synthetic construct
  source 1..21: mol_type = other DNA
  misc_feature 1..19: note = RNA
  misc_feature 20..21: note = DNA
tgtgcccagggtaaccctttt

SEQ ID NO: 4094 - DNA, 21 bp, synthetic construct
  source 1..21: mol_type = other DNA
  misc_feature 1..19: note = RNA
  misc_feature 20..21: note = DNA
tgttagaaacctctttacatt

SEQ ID NO: 4095 - DNA, 21 bp, synthetic construct
  source 1..21: mol_type = other DNA
  misc_feature 1..19: note = RNA
  misc_feature 20..21: note = DNA
ttcctcgcgccgcaagccatt

SEQ ID NO: 4096 - DNA, 21 bp, synthetic construct
  source 1..21: mol_type = other DNA
  misc_feature 1..19: note = RNA
  misc_feature 20..21: note = DNA
tctcgtcagctagcgtggctt

SEQ ID NO: 4097 - DNA, 21 bp, synthetic construct
  source 1..21: mol_type = other DNA
  misc_feature 1..19: note = RNA
  misc_feature 20..21: note = DNA
tttgtaagcctcctttgggtt

SEQ ID NO: 4098 - DNA, 21 bp, synthetic construct
  source 1..21: mol_type = other DNA
  misc_feature 1..19: note = RNA
  misc_feature 20..21: note = DNA
ttccccccatagcacaacatt

SEQ ID NO: 4099 - DNA, 21 bp, synthetic construct
  source 1..21: mol_type = other DNA
  misc_feature 1..19: note = RNA
  misc_feature 20..21: note = DNA
tccaagggggtgtgttccctt

SEQ ID NO: 4100 - DNA, 21 bp, synthetic construct
  source 1..21: mol_type = other DNA
  misc_feature 1..19: note = RNA
  misc_feature 20..21: note = DNA
tccacccatcaatttggaatt

SEQ ID NO: 4101 - DNA, 21 bp, synthetic construct
  source 1..21: mol_type = other DNA
  misc_feature 1..19: note = RNA
  misc_feature 20..21: note = DNA
tcatgtcgatgctgccggttt

SEQ ID NO: 4102 - DNA, 21 bp, synthetic construct
  source 1..21: mol_type = other DNA
  misc_feature 1..19: note = RNA
  misc_feature 20..21: note = DNA
tcctcgcgccgcaagccagtt

SEQ ID NO: 4103 - DNA, 21 bp, synthetic construct
  source 1..21: mol_type = other DNA
  misc_feature 1..19: note = RNA
  misc_feature 20..21: note = DNA
tatgttaactatcttacactt

SEQ ID NO: 4104 - DNA, 21 bp, synthetic construct
  source 1..21: mol_type = other DNA
  misc_feature 1..19: note = RNA
  misc_feature 20..21: note = DNA
tcgcttcagtcctaatccttt

SEQ ID NO: 4105 - DNA, 21 bp, synthetic construct
  source 1..21: mol_type = other DNA
  misc_feature 1..19: note = RNA
  misc_feature 20..21: note = DNA
tttaactatcttacacatttt

SEQ ID NO: 4106 - DNA, 21 bp, synthetic construct
  source 1..21: mol_type = other DNA
  misc_feature 1..19: note = RNA
  misc_feature 20..21: note = DNA
tcatgatcttaggctggcctt

SEQ ID NO: 4107 - DNA, 21 bp, synthetic construct
  source 1..21: mol_type = other DNA
  misc_feature 1..19: note = RNA
  misc_feature 20..21: note = DNA
tgtcaatttaaatggaacttt

SEQ ID NO: 4108 - DNA, 21 bp, synthetic construct
  source 1..21: mol_type = other DNA
  misc_feature 1..19: note = RNA
  misc_feature 20..21: note = DNA
tgaagtcaatttaaatggatt

SEQ ID NO: 4109 - DNA, 21 bp, synthetic construct
  source 1..21: mol_type = other DNA
  misc_feature 1..19: note = RNA
  misc_feature 20..21: note = DNA
tacacctcgtgagggtgggtt

SEQ ID NO: 4110 - DNA, 21 bp, synthetic construct
  source 1..21: mol_type = other DNA
  misc_feature 1..19: note = RNA
  misc_feature 20..21: note = DNA
tgaaagctaagctaagatgtt

SEQ ID NO: 4111 - DNA, 21 bp, synthetic construct
  source 1..21: mol_type = other DNA
  misc_feature 1..19: note = RNA
  misc_feature 20..21: note = DNA
taaactcatggggctaagttt

SEQ ID NO: 4112 - DNA, 21 bp, synthetic construct
  source 1..21: mol_type = other DNA
  misc_feature 1..19: note = RNA
  misc_feature 20..21: note = DNA
tgatcaccctaaaccatgatt

SEQ ID NO: 4113 - DNA, 21 bp, synthetic construct
  source 1..21: mol_type = other DNA
  misc_feature 1..19: note = RNA
  misc_feature 20..21: note = DNA
ttaatcctgtgcttcaggctt

SEQ ID NO: 4114 - DNA, 21 bp, synthetic construct
  source 1..21: mol_type = other DNA
  misc_feature 1..19: note = RNA
  misc_feature 20..21: note = DNA
taatttcaccctcagtatgtt

SEQ ID NO: 4115 - DNA, 21 bp, synthetic construct
  source 1..21: mol_type = other DNA
  misc_feature 1..19: note = RNA
  misc_feature 20..21: note = DNA
taccctaaaccatgatctttt

SEQ ID NO: 4116 - DNA, 21 bp, synthetic construct
  source 1..21: mol_type = other DNA
  misc_feature 1..19: note = RNA
  misc_feature 20..21: note = DNA
tccacaagggggagatccctt

SEQ ID NO: 4117 - DNA, 21 bp, synthetic construct
  source 1..21: mol_type = other DNA
  misc_feature 1..19: note = RNA
  misc_feature 20..21: note = DNA
tctatcttacacattcctctt

SEQ ID NO: 4118 - DNA, 21 bp, synthetic construct
  source 1..21: mol_type = other DNA
  misc_feature 1..19: note = RNA
  misc_feature 20..21: note = DNA
tatcaccctaaaccatgattt

SEQ ID NO: 4119 - DNA, 21 bp, synthetic construct
  source 1..21: mol_type = other DNA
  misc_feature 1..19: note = RNA
  misc_feature 20..21: note = DNA
ttctaccatgtcgatgctgtt

SEQ ID NO: 4120 - DNA, 21 bp, synthetic construct
  source 1..21: mol_type = other DNA
  misc_feature 1..19: note = RNA
  misc_feature 20..21: note = DNA
ttattcctacgcctgcacctt

SEQ ID NO: 4121 - DNA, 21 bp, synthetic construct
  source 1..21: mol_type = other DNA
  misc_feature 1..19: note = RNA
  misc_feature 20..21: note = DNA
tactatcttacacattccttt

SEQ ID NO: 4122 - DNA, 21 bp, synthetic construct
  source 1..21: mol_type = other DNA
  misc_feature 1..19: note = RNA
  misc_feature 20..21: note = DNA
ttgatcaccctaaaccatgtt

SEQ ID NO: 4123 - DNA, 21 bp, synthetic construct
  source 1..21: mol_type = other DNA
  misc_feature 1..19: note = RNA
  misc_feature 20..21: note = DNA
tgacggcgacttgggtggatt

SEQ ID NO: 4124 - DNA, 21 bp, synthetic construct
  source 1..21: mol_type = other DNA
  misc_feature 1..19: note = RNA
  misc_feature 20..21: note = DNA
taaccagggtcattactgatt

SEQ ID NO: 4125 - DNA, 21 bp, synthetic construct
  source 1..21: mol_type = other DNA
  misc_feature 1..19: note = RNA
  misc_feature 20..21: note = DNA
tttagccctaaagtcccagtt

SEQ ID NO: 4126 - DNA, 21 bp, synthetic construct
  source 1..21: mol_type = other DNA
  misc_feature 1..19: note = RNA
  misc_feature 20..21: note = DNA
ttccatattcctacgcctgtt

SEQ ID NO: 4127 - DNA, 21 bp, synthetic construct
  source 1..21: mol_type = other DNA
  misc_feature 1..19: note = RNA
  misc_feature 20..21: note = DNA
tccatattcctacgcctgctt

SEQ ID NO: 4128 - DNA, 21 bp, synthetic construct
  source 1..21: mol_type = other DNA
  misc_feature 1..19: note = RNA
  misc_feature 20..21: note = DNA
tcgccccgacctcgtggcttt

SEQ ID NO: 4129 - DNA, 21 bp, synthetic construct
  source 1..21: mol_type = other DNA
  misc_feature 1..19: note = RNA
  misc_feature 20..21: note = DNA
ttcttagggaggcatgatttt

SEQ ID NO: 4130 - DNA, 21 bp, synthetic construct
  source 1..21: mol_type = other DNA
  misc_feature 1..19: note = RNA
  misc_feature 20..21: note = DNA
tagaggtgccaacggcttatt

SEQ ID NO: 4131 - DNA, 21 bp, synthetic construct
  source 1..21: mol_type = other DNA
  misc_feature 1..19: note = RNA
  misc_feature 20..21: note = DNA
tcgagtctaccatgtcgattt

SEQ ID NO: 4132 - DNA, 21 bp, synthetic construct
  source 1..21: mol_type = other DNA
  misc_feature 1..19: note = RNA
  misc_feature 20..21: note = DNA
tcctcagaattaccgaagatt

SEQ ID NO: 4133 - DNA, 21 bp, synthetic construct
  source 1..21: mol_type = other DNA
  misc_feature 1..19: note = RNA
  misc_feature 20..21: note = DNA
tagacaccactggcgactttt

SEQ ID NO: 4134 - DNA, 21 bp, synthetic construct
  source 1..21: mol_type = other DNA
  misc_feature 1..19: note = RNA
  misc_feature 20..21: note = DNA
tcgtgccttttcaatttattt

SEQ ID NO: 4135 - DNA, 21 bp, synthetic construct
  source 1..21: mol_type = other DNA
  misc_feature 1..19: note = RNA
  misc_feature 20..21: note = DNA
taccccaagggcctctaactt

SEQ ID NO: 4136 - DNA, 21 bp, synthetic construct
  source 1..21: mol_type = other DNA
  misc_feature 1..19: note = RNA
  misc_feature 20..21: note = DNA
tcgctgcgatcccctgatttt

SEQ ID NO: 4137 - DNA, 21 bp, synthetic construct
  source 1..21: mol_type = other DNA
  misc_feature 1..19: note = RNA
  misc_feature 20..21: note = DNA
tcccatgttaactatcttatt

SEQ ID NO: 4138 - DNA, 21 bp, synthetic construct
  source 1..21: mol_type = other DNA
  misc_feature 1..19: note = RNA
  misc_feature 20..21: note = DNA
tcatgttaactatcttacatt

SEQ ID NO: 4139 - DNA, 21 bp, synthetic construct
  source 1..21: mol_type = other DNA
  misc_feature 1..19: note = RNA
  misc_feature 20..21: note = DNA
taccaaggacaggcggccgtt

SEQ ID NO: 4140 - DNA, 21 bp, synthetic construct
  source 1..21: mol_type = other DNA
  misc_feature 1..19: note = RNA
  misc_feature 20..21: note = DNA
taaccccaagggcctctaatt

SEQ ID NO: 4141 - DNA, 21 bp, synthetic construct
  source 1..21: mol_type = other DNA
  misc_feature 1..19: note = RNA
  misc_feature 20..21: note = DNA
ttgtagccgctgcgatccctt

SEQ ID NO: 4142 - DNA, 21 bp, synthetic construct
  source 1..21: mol_type = other DNA
  misc_feature 1..19: note = RNA
  misc_feature 20..21: note = DNA
tcctcgccccgacctcgtgtt

SEQ ID NO: 4143 - DNA, 21 bp, synthetic construct
  source 1..21: mol_type = other DNA
  misc_feature 1..19: note = RNA
  misc_feature 20..21: note = DNA
gctttggctcgggacttcctt

SEQ ID NO: 4144 - DNA, 21 bp, synthetic construct
  source 1..21: mol_type = other DNA
  misc_feature 1..19: note = RNA
  misc_feature 20..21: note = DNA
cgacatggtagactcgccctt

SEQ ID NO: 4145 - DNA, 21 bp, synthetic construct
  source 1..21: mol_type = other DNA
  misc_feature 1..19: note = RNA
  misc_feature 20..21: note = DNA
ctcctcgcagttcggttactt

SEQ ID NO: 4146 - DNA, 21 bp, synthetic construct
  source 1..21: mol_type = other DNA
  misc_feature 1..19: note = RNA
  misc_feature 20..21: note = DNA
ggctttggctcgggacttctt

SEQ ID NO: 4147 - DNA, 21 bp, synthetic construct
  source 1..21: mol_type = other DNA
  misc_feature 1..19: note = RNA
  misc_feature 20..21: note = DNA
ggctttggctcgggacttatt

SEQ ID NO: 4148 - DNA, 21 bp, synthetic construct
  source 1..21: mol_type = other DNA
  misc_feature 1..19: note = RNA
  misc_feature 20..21: note = DNA
ggctttggctcgggacttttt

SEQ ID NO: 4149 - DNA, 21 bp, synthetic construct
  source 1..21: mol_type = other DNA
  misc_feature 1..19: note = RNA
  misc_feature 20..21: note = DNA
ggctttggcacgggacttctt

SEQ ID NO: 4150 - DNA, 21 bp, synthetic construct
  source 1..21: mol_type = other DNA
  misc_feature 1..19: note = RNA
  misc_feature 20..21: note = DNA
ggctttggctcgggacttgtt

SEQ ID NO: 4151 - DNA, 21 bp, synthetic construct
  source 1..21: mol_type = other DNA
  misc_feature 1..19: note = RNA
  misc_feature 20..21: note = DNA
gcatcgacatggtagactctt

SEQ ID NO: 4152 - DNA, 21 bp, synthetic construct
  source 1..21: mol_type = other DNA
  misc_feature 1..19: note = RNA
  misc_feature 20..21: note = DNA
gcatcgacatggtagactatt

SEQ ID NO: 4153 - DNA, 21 bp, synthetic construct
  source 1..21: mol_type = other DNA
  misc_feature 1..19: note = RNA
  misc_feature 20..21: note = DNA
gcatcgacatggtagactttt

SEQ ID NO: 4154 - DNA, 21 bp, synthetic construct
  source 1..21: mol_type = other DNA
  misc_feature 1..19: note = RNA
  misc_feature 20..21: note = DNA
gcatcgacaaggtagactctt

SEQ ID NO: 4155 - DNA, 21 bp, synthetic construct
  source 1..21: mol_type = other DNA
  misc_feature 1..19: note = RNA
  misc_feature 20..21: note = DNA
gcatcgacatggtagactgtt

SEQ ID NO: 4156 - DNA, 21 bp, synthetic construct
  source 1..21: mol_type = other DNA
  misc_feature 1..19: note = RNA
  misc_feature 20..21: note = DNA
tgctcctcgcagttcggtctt

SEQ ID NO: 4157 - DNA, 21 bp, synthetic construct
  source 1..21: mol_type = other DNA
  misc_feature 1..19: note = RNA
  misc_feature 20..21: note = DNA
cacccaagtcgccgtcttctt

SEQ ID NO: 4158 - DNA, 21 bp, synthetic construct
  source 1..21: mol_type = other DNA
  misc_feature 1..19: note = RNA
  misc_feature 20..21: note = DNA
cctcgcagttcggttaatctt

SEQ ID NO: 4159 - DNA, 21 bp, synthetic construct
  source 1..21: mol_type = other DNA
  misc_feature 1..19: note = RNA
  misc_feature 20..21: note = DNA
tcctcgcagttcggttaactt

SEQ ID NO: 4160 - DNA, 21 bp, synthetic construct
  source 1..21: mol_type = other DNA
  misc_feature 1..19: note = RNA
  misc_feature 20..21: note = DNA
agctgaccttccgcgagactt

SEQ ID NO: 4161 - DNA, 21 bp, synthetic construct
  source 1..21: mol_type = other DNA
  misc_feature 1..19: note = RNA
  misc_feature 20..21: note = DNA
gactggaagcgatgacaactt

SEQ ID NO: 4162 - DNA, 21 bp, synthetic construct
  source 1..21: mol_type = other DNA
  misc_feature 1..19: note = RNA
  misc_feature 20..21: note = DNA
gactggaagcgatgacaaatt

SEQ ID NO: 4163 - DNA, 21 bp, synthetic construct
  source 1..21: mol_type = other DNA
  misc_feature 1..19: note = RNA
  misc_feature 20..21: note = DNA
gactggaagcgatgacaattt

SEQ ID NO: 4164 - DNA, 21 bp, synthetic construct
  source 1..21: mol_type = other DNA
  misc_feature 1..19: note = RNA
  misc_feature 20..21: note = DNA
gactggaagggatgacaactt

SEQ ID NO: 4165 - DNA, 21 bp, synthetic construct
  source 1..21: mol_type = other DNA
  misc_feature 1..19: note = RNA
  misc_feature 20..21: note = DNA
gactggaagcgatgacaagtt

SEQ ID NO: 4166 - DNA, 21 bp, synthetic construct
  source 1..21: mol_type = other DNA
  misc_feature 1..19: note = RNA
  misc_feature 20..21: note = DNA
agctcgcatggtcagtaactt

SEQ ID NO: 4167 - DNA, 21 bp, synthetic construct
  source 1..21: mol_type = other DNA
  misc_feature 1..19: note = RNA
  misc_feature 20..21: note = DNA
agtctacaaaccagttgactt

SEQ ID NO: 4168 - DNA, 21 bp, synthetic construct
  source 1..21: mol_type = other DNA
  misc_feature 1..19: note = RNA
  misc_feature 20..21: note = DNA
gctcctcgcagttcggttctt

SEQ ID NO: 4169 - DNA, 21 bp, synthetic construct
  source 1..21: mol_type = other DNA
  misc_feature 1..19: note = RNA
  misc_feature 20..21: note = DNA
gctcctcgcagttcggttgtt

SEQ ID NO: 4170 - DNA, 21 bp, synthetic construct
  source 1..21: mol_type = other DNA
  misc_feature 1..19: note = RNA
  misc_feature 20..21: note = DNA
gctcctcgcagttcggttttt

SEQ ID NO: 4171 - DNA, 21 bp, synthetic construct
  source 1..21: mol_type = other DNA
  misc_feature 1..19: note = RNA
  misc_feature 20..21: note = DNA
gctcctcgctgttcggttctt

SEQ ID NO: 4172 - DNA, 21 bp, synthetic construct
  source 1..21: mol_type = other DNA
  misc_feature 1..19: note = RNA
  misc_feature 20..21: note = DNA
cttccgcgagaacgccaactt

SEQ ID NO: 4173 - DNA, 21 bp, synthetic construct
  source 1..21: mol_type = other DNA
  misc_feature 1..19: note = RNA
  misc_feature 20..21: note = DNA
cttccgcgagaacgccaaatt

SEQ ID NO: 4174 - DNA, 21 bp, synthetic construct
  source 1..21: mol_type = other DNA
  misc_feature 1..19: note = RNA
  misc_feature 20..21: note = DNA
cttccgcgagaacgccaattt

SEQ ID NO: 4175 - DNA, 21 bp, synthetic construct
  source 1..21: mol_type = other DNA
  misc_feature 1..19: note = RNA
  misc_feature 20..21: note = DNA
cttccgcgacaacgccaactt

SEQ ID NO: 4176 - DNA, 21 bp, synthetic construct
  source 1..21: mol_type = other DNA
  misc_feature 1..19: note = RNA
  misc_feature 20..21: note = DNA
cttccgcgagaacgccaagtt

SEQ ID NO: 4177 - DNA, 21 bp, synthetic construct
  source 1..21: mol_type = other DNA
  misc_feature 1..19: note = RNA
  misc_feature 20..21: note = DNA
aaatcagtgatgggagtactt

SEQ ID NO: 4178 - DNA, 21 bp, synthetic construct
  source 1..21: mol_type = other DNA
  misc_feature 1..19: note = RNA
  misc_feature 20..21: note = DNA
gtcgccgtcttccgccaactt

SEQ ID NO: 4179 - DNA, 21 bp, synthetic construct
  source 1..21: mol_type = other DNA
  misc_feature 1..19: note = RNA
  misc_feature 20..21: note = DNA
atggtaaaacgaagatcgctt

SEQ ID NO: 4180 - DNA, 21 bp, synthetic construct
  source 1..21: mol_type = other DNA
  misc_feature 1..19: note = RNA
  misc_feature 20..21: note = DNA
acgaagatcgccacaccgctt

SEQ ID NO: 4181 - DNA, 21 bp, synthetic construct
  source 1..21: mol_type = other DNA
  misc_feature 1..19: note = RNA
  misc_feature 20..21: note = DNA
cgcagttcggttaattggctt

SEQ ID NO: 4182 - DNA, 21 bp, synthetic construct
  source 1..21: mol_type = other DNA
  misc_feature 1..19: note = RNA
  misc_feature 20..21: note = DNA
gtactccacccaagtcgcctt

SEQ ID NO: 4183 - DNA, 21 bp, synthetic construct
  source 1..21: mol_type = other DNA
  misc_feature 1..19: note = RNA
  misc_feature 20..21: note = DNA
ctcggctttggctcgggactt

SEQ ID NO: 4184 - DNA, 21 bp, synthetic construct
  source 1..21: mol_type = other DNA
  misc_feature 1..19: note = RNA
  misc_feature 20..21: note = DNA
gcccctggggcggtcaatctt

SEQ ID NO: 4185 - DNA, 21 bp, synthetic construct
  source 1..21: mol_type = other DNA
  misc_feature 1..19: note = RNA
  misc_feature 20..21: note = DNA
ctcgcagttcggttaattctt

SEQ ID NO: 4186 - DNA, 21 bp, synthetic construct
  source 1..21: mol_type = other DNA
  misc_feature 1..19: note = RNA
  misc_feature 20..21: note = DNA
tcgccgtcttccgccaagctt

SEQ ID NO: 4187 - DNA, 21 bp, synthetic construct
  source 1..21: mol_type = other DNA
  misc_feature 1..19: note = RNA
  misc_feature 20..21: note = DNA
gacgggactggaagcgatctt

SEQ ID NO: 4188 - DNA, 21 bp, synthetic construct
  source 1..21: mol_type = other DNA
  misc_feature 1..19: note = RNA
  misc_feature 20..21: note = DNA
tggtaaaacgaagatcgcctt

SEQ ID NO: 4189 - DNA, 21 bp, synthetic construct
  source 1..21: mol_type = other DNA
  misc_feature 1..19: note = RNA
  misc_feature 20..21: note = DNA
gtaaaacgaagatcgccactt

SEQ ID NO: 4190 - DNA, 21 bp, synthetic construct
  source 1..21: mol_type = other DNA
  misc_feature 1..19: note = RNA
  misc_feature 20..21: note = DNA
acaatatcacccacgtccctt

SEQ ID NO: 4191 - DNA, 21 bp, synthetic construct
  source 1..21: mol_type = other DNA
  misc_feature 1..19: note = RNA
  misc_feature 20..21: note = DNA
ccttccgcgagaacgccactt

SEQ ID NO: 4192 - DNA, 21 bp, synthetic construct
  source 1..21: mol_type = other DNA
  misc_feature 1..19: note = RNA
  misc_feature 20..21: note = DNA
gggggctgatggtaaaacctt

SEQ ID NO: 4193 - DNA, 21 bp, synthetic construct
  source 1..21: mol_type = other DNA
  misc_feature 1..19: note = RNA
  misc_feature 20..21: note = DNA
gccgtcttccgccaagagctt

SEQ ID NO: 4194 - DNA, 21 bp, synthetic construct
  source 1..21: mol_type = other DNA
  misc_feature 1..19: note = RNA
  misc_feature 20..21: note = DNA
caccggcagcatcgacatctt

SEQ ID NO: 4195 - DNA, 21 bp, synthetic construct
  source 1..21: mol_type = other DNA
  misc_feature 1..19: note = RNA
  misc_feature 20..21: note = DNA
gtaaaagcaaagacgggactt

SEQ ID NO: 4196 - DNA, 21 bp, synthetic construct
  source 1..21: mol_type = other DNA
  misc_feature 1..19: note = RNA
  misc_feature 20..21: note = DNA
aggtttctaacccaccctctt

SEQ ID NO: 4197 - DNA, 21 bp, synthetic construct
  source 1..21: mol_type = other DNA
  misc_feature 1..19: note = RNA
  misc_feature 20..21: note = DNA
ttccgcgagaacgccaaactt

SEQ ID NO: 4198 - DNA, 21 bp, synthetic construct
  source 1..21: mol_type = other DNA
  misc_feature 1..19: note = RNA
  misc_feature 20..21: note = DNA
gaccttccgcgagaacgcctt

SEQ ID NO: 4199 - DNA, 21 bp, synthetic construct
  source 1..21: mol_type = other DNA
  misc_feature 1..19: note = RNA
  misc_feature 20..21: note = DNA
cgccacgctagctgacgactt

SEQ ID NO: 4200 - DNA, 21 bp, synthetic construct
  source 1..21: mol_type = other DNA
  misc_feature 1..19: note = RNA
  misc_feature 20..21: note = DNA
acctgcgtgtcccatctactt

SEQ ID NO: 4201 - DNA, 21 bp, synthetic construct
  source 1..21: mol_type = other DNA
  misc_feature 1..19: note = RNA
  misc_feature 20..21: note = DNA
ccccagctcgccacgctactt

SEQ ID NO: 4202 - DNA, 21 bp, synthetic construct
  source 1..21: mol_type = other DNA
  misc_feature 1..19: note = RNA
  misc_feature 20..21: note = DNA
gccgttcagctgtgacgactt

SEQ ID NO: 4203 - DNA, 21 bp, synthetic construct
  source 1..21: mol_type = other DNA
  misc_feature 1..19: note = RNA
  misc_feature 20..21: note = DNA
gctgatggtaaaacgaagctt

SEQ ID NO: 4204 - DNA, 21 bp, synthetic construct
  source 1..21: mol_type = other DNA
  misc_feature 1..19: note = RNA
  misc_feature 20..21: note = DNA
acgaggtgtctctcacccctt

SEQ ID NO: 4205 - DNA, 21 bp, synthetic construct
  source 1..21: mol_type = other DNA
  misc_feature 1..19: note = RNA
  misc_feature 20..21: note = DNA
gggccagcctaagatcatctt

SEQ ID NO: 4206 - DNA, 21 bp, synthetic construct
  source 1..21: mol_type = other DNA
  misc_feature 1..19: note = RNA
  misc_feature 20..21: note = DNA
tctaacccaccctcacgactt

SEQ ID NO: 4207 - DNA, 21 bp, synthetic construct
  source 1..21: mol_type = other DNA
  misc_feature 1..19: note = RNA
  misc_feature 20..21: note = DNA
taaagaggtttctaacccctt

SEQ ID NO: 4208 - DNA, 21 bp, synthetic construct
  source 1..21: mol_type = other DNA
  misc_feature 1..19: note = RNA
  misc_feature 20..21: note = DNA
ctcacctcctaatagactctt

SEQ ID NO: 4209 - DNA, 21 bp, synthetic construct
  source 1..21: mol_type = other DNA
  misc_feature 1..19: note = RNA
  misc_feature 20..21: note = DNA
ggatatactgtatgccggctt

SEQ ID NO: 4210 - DNA, 21 bp, synthetic construct
  source 1..21: mol_type = other DNA
  misc_feature 1..19: note = RNA
  misc_feature 20..21: note = DNA
caccctcacgaggtgtctctt

SEQ ID NO: 4211 - DNA, 21 bp, synthetic construct
  source 1..21: mol_type = other DNA
  misc_feature 1..19: note = RNA
  misc_feature 20..21: note = DNA
cacgctagctgacgaggtctt

SEQ ID NO: 4212 - DNA, 21 bp, synthetic construct
  source 1..21: mol_type = other DNA
  misc_feature 1..19: note = RNA
  misc_feature 20..21: note = DNA
tcccatgatttcttcggtctt

SEQ ID NO: 4213 - DNA, 21 bp, synthetic construct
  source 1..21: mol_type = other DNA
  misc_feature 1..19: note = RNA
  misc_feature 20..21: note = DNA
ttgagttgtagttggattctt

SEQ ID NO: 4214 - DNA, 21 bp, synthetic construct
  source 1..21: mol_type = other DNA
  misc_feature 1..19: note = RNA
  misc_feature 20..21: note = DNA
ctgcgtgtcccatctacactt

SEQ ID NO: 4215 - DNA, 21 bp, synthetic construct
  source 1..21: mol_type = other DNA
  misc_feature 1..19: note = RNA
  misc_feature 20..21: note = DNA
gttgagttgtagttggatctt

SEQ ID NO: 4216 - DNA, 21 bp, synthetic construct
  source 1..21: mol_type = other DNA
  misc_feature 1..19: note = RNA
  misc_feature 20..21: note = DNA
ggtggtggttagagatatctt

SEQ ID NO: 4217 - DNA, 21 bp, synthetic construct
  source 1..21: mol_type = other DNA
  misc_feature 1..19: note = RNA
  misc_feature 20..21: note = DNA
gggctagataggatatacctt

SEQ ID NO: 4218 - DNA, 21 bp, synthetic construct
  source 1..21: mol_type = other DNA
  misc_feature 1..19: note = RNA
  misc_feature 20..21: note = DNA
aggattccagcaaaaaccctt

SEQ ID NO: 4219 - DNA, 21 bp, synthetic construct
  source 1..21: mol_type = other DNA
  misc_feature 1..19: note = RNA
  misc_feature 20..21: note = DNA
ggcccctggggcggtcaactt

SEQ ID NO: 4220 - DNA, 21 bp, synthetic construct
  source 1..21: mol_type = other DNA
  misc_feature 1..19: note = RNA
  misc_feature 20..21: note = DNA
gattaggactgaagcgatctt

SEQ ID NO: 4221 - DNA, 21 bp, synthetic construct
  source 1..21: mol_type = other DNA
  misc_feature 1..19: note = RNA
  misc_feature 20..21: note = DNA
ctcccaagttttgaaaggctt

SEQ ID NO: 4222 - DNA, 21 bp, synthetic construct
  source 1..21: mol_type = other DNA
  misc_feature 1..19: note = RNA
  misc_feature 20..21: note = DNA
gctggtctggcttgcggcctt

SEQ ID NO: 4223 - DNA, 21 bp, synthetic construct
  source 1..21: mol_type = other DNA
  misc_feature 1..19: note = RNA
  misc_feature 20..21: note = DNA
gttccactcatccaactgctt

SEQ ID NO: 4224 - DNA, 21 bp, synthetic construct
  source 1..21: mol_type = other DNA
  misc_feature 1..19: note = RNA
  misc_feature 20..21: note = DNA
cacctcctaatagacttactt

SEQ ID NO: 4225 - DNA, 21 bp, synthetic construct
  source 1..21: mol_type = other DNA
  misc_feature 1..19: note = RNA
  misc_feature 20..21: note = DNA
ttctaacccaccctcacgctt

SEQ ID NO: 4226 - DNA, 21 bp, synthetic construct
  source 1..21: mol_type = other DNA
  misc_feature 1..19: note = RNA
  misc_feature 20..21: note = DNA
aagcccacaatcatgcctctt

SEQ ID NO: 4227 - DNA, 21 bp, synthetic construct
  source 1..21: mol_type = other DNA
  misc_feature 1..19: note = RNA
  misc_feature 20..21: note = DNA
accttccgcgagaacgccctt

SEQ ID NO: 4228 - DNA, 21 bp, synthetic construct
  source 1..21: mol_type = other DNA
  misc_feature 1..19: note = RNA
  misc_feature 20..21: note = DNA
gctggtcacgtgacccaactt

SEQ ID NO: 4229 - DNA, 21 bp, synthetic construct
  source 1..21: mol_type = other DNA
  misc_feature 1..19: note = RNA
  misc_feature 20..21: note = DNA
taacccaccctcacgaggctt

SEQ ID NO: 4230 - DNA, 21 bp, synthetic construct
  source 1..21: mol_type = other DNA
  misc_feature 1..19: note = RNA
  misc_feature 20..21: note = DNA
cttacaactcctgcatcactt

SEQ ID NO: 4231 - DNA, 21 bp, synthetic construct
  source 1..21: mol_type = other DNA
  misc_feature 1..19: note = RNA
  misc_feature 20..21: note = DNA
tgggactttagggctaacctt

SEQ ID NO: 4232 - DNA, 21 bp, synthetic construct
  source 1..21: mol_type = other DNA
  misc_feature 1..19: note = RNA
  misc_feature 20..21: note = DNA
gccacaggcagacgatgtctt

SEQ ID NO: 4233 - DNA, 21 bp, synthetic construct
  source 1..21: mol_type = other DNA
  misc_feature 1..19: note = RNA
  misc_feature 20..21: note = DNA
gcctcttgggagacgtccctt

SEQ ID NO: 4234 - DNA, 21 bp, synthetic construct
  source 1..21: mol_type = other DNA
  misc_feature 1..19: note = RNA
  misc_feature 20..21: note = DNA
gagatatgcccccctcatctt

SEQ ID NO: 4235 - DNA, 21 bp, synthetic construct
  source 1..21: mol_type = other DNA
  misc_feature 1..19: note = RNA
  misc_feature 20..21: note = DNA
tcccaagttttgaaaggcctt

SEQ ID NO: 4236 - DNA, 21 bp, synthetic construct
  source 1..21: mol_type = other DNA
  misc_feature 1..19: note = RNA
  misc_feature 20..21: note = DNA
agttattactctgattaactt

SEQ ID NO: 4237 - DNA, 21 bp, synthetic construct
  source 1..21: mol_type = other DNA
  misc_feature 1..19: note = RNA
  misc_feature 20..21: note = DNA
tatgcccccctcattactctt

SEQ ID NO: 4238 - DNA, 21 bp, synthetic construct
  source 1..21: mol_type = other DNA
  misc_feature 1..19: note = RNA
  misc_feature 20..21: note = DNA
caaaatcaggggatcgcactt

SEQ ID NO: 4239 - DNA, 21 bp, synthetic construct
  source 1..21: mol_type = other DNA
  misc_feature 1..19: note = RNA
  misc_feature 20..21: note = DNA
cagaccacggggcggagactt

SEQ ID NO: 4240 - DNA, 21 bp, synthetic construct
  source 1..21: mol_type = other DNA
  misc_feature 1..19: note = RNA
  misc_feature 20..21: note = DNA
cttgggtgggctagatagctt

SEQ ID NO: 4241 - DNA, 21 bp, synthetic construct
  source 1..21: mol_type = other DNA
  misc_feature 1..19: note = RNA
  misc_feature 20..21: note = DNA
ctcgccacgctagctgacctt

SEQ ID NO: 4242 - DNA, 21 bp, synthetic construct
  source 1..21: mol_type = other DNA
  misc_feature 1..19: note = RNA
  misc_feature 20..21: note = DNA
tgttgagttgtagttggactt

SEQ ID NO: 4243 - DNA, 21 bp, synthetic construct
  source 1..21: mol_type = other DNA
  misc_feature 1..19: note = RNA
  misc_feature 20..21: note = DNA
tatacatagatgttgcccctt

SEQ ID NO: 4244 - DNA, 21 bp, synthetic construct
  source 1..21: mol_type = other DNA
  misc_feature 1..19: note = RNA
  misc_feature 20..21: note = DNA
aacccaccctcacgaggtctt

SEQ ID NO: 4245 - DNA, 21 bp, synthetic construct
  source 1..21: mol_type = other DNA
  misc_feature 1..19: note = RNA
  misc_feature 20..21: note = DNA
gttgagcaggactatttcctt

SEQ ID NO: 4246 - DNA, 21 bp, synthetic construct
  source 1..21: mol_type = other DNA
  misc_feature 1..19: note = RNA
  misc_feature 20..21: note = DNA
ccacgctagctgacgaggctt

SEQ ID NO: 4247 - DNA, 21 bp, synthetic construct
  source 1..21: mol_type = other DNA
  misc_feature 1..19: note = RNA
  misc_feature 20..21: note = DNA
ctcctaatagacttagccctt

SEQ ID NO: 4248 - DNA, 21 bp, synthetic construct
  source 1..21: mol_type = other DNA
  misc_feature 1..19: note = RNA
  misc_feature 20..21: note = DNA
gatttcttcggtaattctctt

SEQ ID NO: 4249 - DNA, 21 bp, synthetic construct
  source 1..21: mol_type = other DNA
  misc_feature 1..19: note = RNA
  misc_feature 20..21: note = DNA
gtcccaaaggaggcttacctt

SEQ ID NO: 4250 - DNA, 21 bp, synthetic construct
  source 1..21: mol_type = other DNA
  misc_feature 1..19: note = RNA
  misc_feature 20..21: note = DNA
ggtggttagagatatgccctt

SEQ ID NO: 4251 - DNA, 21 bp, synthetic construct
  source 1..21: mol_type = other DNA
  misc_feature 1..19: note = RNA
  misc_feature 20..21: note = DNA
ggctagataggatatactctt

SEQ ID NO: 4252 - DNA, 21 bp, synthetic construct
  source 1..21: mol_type = other DNA
  misc_feature 1..19: note = RNA
  misc_feature 20..21: note = DNA
attcaccagagtgactatctt

SEQ ID NO: 4253 - DNA, 21 bp, synthetic construct
  source 1..21: mol_type = other DNA
  misc_feature 1..19: note = RNA
  misc_feature 20..21: note = DNA
gatatactgtatgccggcctt

SEQ ID NO: 4254 - DNA, 21 bp, synthetic construct
  source 1..21: mol_type = other DNA
  misc_feature 1..19: note = RNA
  misc_feature 20..21: note = DNA
gaccacagcagggattggctt

SEQ ID NO: 4255 - DNA, 21 bp, synthetic construct
  source 1..21: mol_type = other DNA
  misc_feature 1..19: note = RNA
  misc_feature 20..21: note = DNA
gagccacaggcagacgatctt

SEQ ID NO: 4256 - DNA, 21 bp, synthetic construct
  source 1..21: mol_type = other DNA
  misc_feature 1..19: note = RNA
  misc_feature 20..21: note = DNA
ctagctgacgaggtgtctctt

SEQ ID NO: 4257 - DNA, 21 bp, synthetic construct
  source 1..21: mol_type = other DNA
  misc_feature 1..19: note = RNA
  misc_feature 20..21: note = DNA
aagggggctgatggtaaactt

SEQ ID NO: 4258 - DNA, 21 bp, synthetic construct
  source 1..21: mol_type = other DNA
  misc_feature 1..19: note = RNA
  misc_feature 20..21: note = DNA
atcaggggatcgcagcggctt

SEQ ID NO: 4259 - DNA, 21 bp, synthetic construct
  source 1..21: mol_type = other DNA
  misc_feature 1..19: note = RNA
  misc_feature 20..21: note = DNA
cccagctcgccacgctagctt

SEQ ID NO: 4260 - DNA, 21 bp, synthetic construct
  source 1..21: mol_type = other DNA
  misc_feature 1..19: note = RNA
  misc_feature 20..21: note = DNA
cgttcagctgtgacgaagctt

SEQ ID NO: 4261 - DNA, 21 bp, synthetic construct
  source 1..21: mol_type = other DNA
  misc_feature 1..19: note = RNA
  misc_feature 20..21: note = DNA
cacttgcaagtcccatgactt

SEQ ID NO: 4262 - DNA, 21 bp, synthetic construct
  source 1..21: mol_type = other DNA
  misc_feature 1..19: note = RNA
  misc_feature 20..21: note = DNA
tgggctagataggatatactt

SEQ ID NO: 4263 - DNA, 21 bp, synthetic construct
  source 1..21: mol_type = other DNA
  misc_feature 1..19: note = RNA
  misc_feature 20..21: note = DNA
tttatgcttggattcaccctt

SEQ ID NO: 4264 - DNA, 21 bp, synthetic construct
  source 1..21: mol_type = other DNA
  misc_feature 1..19: note = RNA
  misc_feature 20..21: note = DNA
ccaaaatcaggggatcgcctt

SEQ ID NO: 4265 - DNA, 21 bp, synthetic construct
  source 1..21: mol_type = other DNA
  misc_feature 1..19: note = RNA
  misc_feature 20..21: note = DNA
ccgttcagctgtgacgaactt

SEQ ID NO: 4266 - DNA, 21 bp, synthetic construct
  source 1..21: mol_type = other DNA
  misc_feature 1..19: note = RNA
  misc_feature 20..21: note = DNA
ggccacatccaacatttcctt

SEQ ID NO: 4267 - DNA, 21 bp, synthetic construct
  source 1..21: mol_type = other DNA
  misc_feature 1..19: note = RNA
  misc_feature 20..21: note = DNA
tttatcaatagttccattctt

SEQ ID NO: 4268 - DNA, 21 bp, synthetic construct
  source 1..21: mol_type = other DNA
  misc_feature 1..19: note = RNA
  misc_feature 20..21: note = DNA
ggcggagatcgtgtacaactt

SEQ ID NO: 4269 - DNA, 21 bp, synthetic construct
  source 1..21: mol_type = other DNA
  misc_feature 1..19: note = RNA
  misc_feature 20..21: note = DNA
tcgccacgctagctgacgctt

SEQ ID NO: 4270 - DNA, 21 bp, synthetic construct
  source 1..21: mol_type = other DNA
  misc_feature 1..19: note = RNA
  misc_feature 20..21: note = DNA
gtctggcttgcggcgcgactt

SEQ ID NO: 4271 - DNA, 21 bp, synthetic construct
  source 1..21: mol_type = other DNA
  misc_feature 1..19: note = RNA
  misc_feature 20..21: note = DNA
acctcctaatagacttagctt

SEQ ID NO: 4272 - DNA, 21 bp, synthetic construct
  source 1..21: mol_type = other DNA
  misc_feature 1..19: note = RNA
  misc_feature 20..21: note = DNA
tgtcccatctacagacctctt

SEQ ID NO: 4273 - DNA, 21 bp, synthetic construct
  source 1..21: mol_type = other DNA
  misc_feature 1..19: note = RNA
  misc_feature 20..21: note = DNA
cggtaattctgagggtggctt

SEQ ID NO: 4274 - DNA, 21 bp, synthetic construct
  source 1..21: mol_type = other DNA
  misc_feature 1..19: note = RNA
  misc_feature 20..21: note = DNA
tttcttcggtaattctgactt

SEQ ID NO: 4275 - DNA, 21 bp, synthetic construct
  source 1..21: mol_type = other DNA
  misc_feature 1..19: note = RNA
  misc_feature 20..21: note = DNA
gcaccctgttgagttgtactt

SEQ ID NO: 4276 - DNA, 21 bp, synthetic construct
  source 1..21: mol_type = other DNA
  misc_feature 1..19: note = RNA
  misc_feature 20..21: note = DNA
atatactgtatgccggctctt

SEQ ID NO: 4277 - DNA, 21 bp, synthetic construct
  source 1..21: mol_type = other DNA
  misc_feature 1..19: note = RNA
  misc_feature 20..21: note = DNA
acttctggtttgggtacactt

SEQ ID NO: 4278 - DNA, 21 bp, synthetic construct
  source 1..21: mol_type = other DNA
  misc_feature 1..19: note = RNA
  misc_feature 20..21: note = DNA
gaagcacaggattaggacctt

SEQ ID NO: 4279 - DNA, 21 bp, synthetic construct
  source 1..21: mol_type = other DNA
  misc_feature 1..19: note = RNA
  misc_feature 20..21: note = DNA
ctttcaggggtcctaagcctt

SEQ ID NO: 4280 - DNA, 21 bp, synthetic construct
  source 1..21: mol_type = other DNA
  misc_feature 1..19: note = RNA
  misc_feature 20..21: note = DNA
gatatgcccccctcattactt

SEQ ID NO: 4281 - DNA, 21 bp, synthetic construct
  source 1..21: mol_type = other DNA
  misc_feature 1..19: note = RNA
  misc_feature 20..21: note = DNA
ctaaggaggccgttcagcctt

SEQ ID NO: 4282 - DNA, 21 bp, synthetic construct
  source 1..21: mol_type = other DNA
  misc_feature 1..19: note = RNA
  misc_feature 20..21: note = DNA
ggaacacacccccttggactt

SEQ ID NO: 4283 - DNA, 21 bp, synthetic construct
  source 1..21: mol_type = other DNA
  misc_feature 1..19: note = RNA
  misc_feature 20..21: note = DNA
cctaagcccacaatcatgctt

SEQ ID NO: 4284 - DNA, 21 bp, synthetic construct
  source 1..21: mol_type = other DNA
  misc_feature 1..19: note = RNA
  misc_feature 20..21: note = DNA
ctggggcctcccaagtttctt

SEQ ID NO: 4285 - DNA, 21 bp, synthetic construct
  source 1..21: mol_type = other DNA
  misc_feature 1..19: note = RNA
  misc_feature 20..21: note = DNA
tgtcccccacttgcacccctt

SEQ ID NO: 4286 - DNA, 21 bp, synthetic construct
  source 1..21: mol_type = other DNA
  misc_feature 1..19: note = RNA
  misc_feature 20..21: note = DNA
aagttattactctgattactt

SEQ ID NO: 4287 - DNA, 21 bp, synthetic construct
  source 1..21: mol_type = other DNA
  misc_feature 1..19: note = RNA
  misc_feature 20..21: note = DNA
aatagacttagccccatgctt

SEQ ID NO: 4288 - DNA, 21 bp, synthetic construct
  source 1..21: mol_type = other DNA
  misc_feature 1..19: note = RNA
  misc_feature 20..21: note = DNA
cagtaatgaccctggttgctt

SEQ ID NO: 4289 - DNA, 21 bp, synthetic construct
  source 1..21: mol_type = other DNA
  misc_feature 1..19: note = RNA
  misc_feature 20..21: note = DNA
ggaggaatgtgtaagatactt

SEQ ID NO: 4290 - DNA, 21 bp, synthetic construct
  source 1..21: mol_type = other DNA
  misc_feature 1..19: note = RNA
  misc_feature 20..21: note = DNA
caatcatgcctccctaagctt

SEQ ID NO: 4291 - DNA, 21 bp, synthetic construct
  source 1..21: mol_type = other DNA
  misc_feature 1..19: note = RNA
  misc_feature 20..21: note = DNA
tccactcatccaactgggctt

SEQ ID NO: 4292 - DNA, 21 bp, synthetic construct
  source 1..21: mol_type = other DNA
  misc_feature 1..19: note = RNA
  misc_feature 20..21: note = DNA
aggtgcaggcgtaggaatctt

SEQ ID NO: 4293 - DNA, 21 bp, synthetic construct
  source 1..21: mol_type = other DNA
  misc_feature 1..19: note = RNA
  misc_feature 20..21: note = DNA
gataggatatactgtatgctt

SEQ ID NO: 4294 - DNA, 21 bp, synthetic construct
  source 1..21: mol_type = other DNA
  misc_feature 1..19: note = RNA
  misc_feature 20..21: note = DNA
tcctaagcccacaatcatctt

SEQ ID NO: 4295 - DNA, 21 bp, synthetic construct
  source 1..21: mol_type = other DNA
  misc_feature 1..19: note = RNA
  misc_feature 20..21: note = DNA
ggccgttcagctgtgacgctt

SEQ ID NO: 4296 - DNA, 21 bp, synthetic construct
  source 1..21: mol_type = other DNA
  misc_feature 1..19: note = RNA
  misc_feature 20..21: note = DNA
tggccacatccaacatttctt

SEQ ID NO: 4297 - DNA, 21 bp, synthetic construct
  source 1..21: mol_type = other DNA
  misc_feature 1..19: note = RNA
  misc_feature 20..21: note = DNA
agcaggactatttctggcctt

SEQ ID NO: 4298 - DNA, 21 bp, synthetic construct
  source 1..21: mol_type = other DNA
  misc_feature 1..19: note = RNA
  misc_feature 20..21: note = DNA
atatggacatctggttgcctt

SEQ ID NO: 4299 - DNA, 21 bp, synthetic construct
  source 1..21: mol_type = other DNA
  misc_feature 1..19: note = RNA
  misc_feature 20..21: note = DNA
acttgcaccctagcttgtctt

SEQ ID NO: 4300 - DNA, 21 bp, synthetic construct
  source 1..21: mol_type = other DNA
  misc_feature 1..19: note = RNA
  misc_feature 20..21: note = DNA
gtaaagaggtttctaaccctt

SEQ ID NO: 4301 - DNA, 21 bp, synthetic construct
  source 1..21: mol_type = other DNA
  misc_feature 1..19: note = RNA
  misc_feature 20..21: note = DNA
gactcactttatcaatagctt

SEQ ID NO: 4302 - DNA, 21 bp, synthetic construct
  source 1..21: mol_type = other DNA
  misc_feature 1..19: note = RNA
  misc_feature 20..21: note = DNA
agctgctgactcactttactt

SEQ ID NO: 4303 - DNA, 21 bp, synthetic construct
  source 1..21: mol_type = other DNA
  misc_feature 1..19: note = RNA
  misc_feature 20..21: note = DNA
aagggttaccctgggcacctt

SEQ ID NO: 4304 - DNA, 21 bp, synthetic construct
  source 1..21: mol_type = other DNA
  misc_feature 1..19: note = RNA
  misc_feature 20..21: note = DNA
tgtaaagaggtttctaacctt

SEQ ID NO: 4305 - DNA, 21 bp, synthetic construct
  source 1..21: mol_type = other DNA
  misc_feature 1..19: note = RNA
  misc_feature 20..21: note = DNA
tggcttgcggcgcgaggactt

SEQ ID NO: 4306 - DNA, 21 bp, synthetic construct
  source 1..21: mol_type = other DNA
  misc_feature 1..19: note = RNA
  misc_feature 20..21: note = DNA
gccacgctagctgacgagctt

SEQ ID NO: 4307 - DNA, 21 bp, synthetic construct
  source 1..21: mol_type = other DNA
  misc_feature 1..19: note = RNA
  misc_feature 20..21: note = DNA
cccaaaggaggcttacaactt

SEQ ID NO: 4308 - DNA, 21 bp, synthetic construct
  source 1..21: mol_type = other DNA
  misc_feature 1..19: note = RNA
  misc_feature 20..21: note = DNA
tgttgtgctatggggggactt

SEQ ID NO: 4309 - DNA, 21 bp, synthetic construct
  source 1..21: mol_type = other DNA
  misc_feature 1..19: note = RNA
  misc_feature 20..21: note = DNA
gggaacacacccccttggctt

SEQ ID NO: 4310 - DNA, 21 bp, synthetic construct
  source 1..21: mol_type = other DNA
  misc_feature 1..19: note = RNA
  misc_feature 20..21: note = DNA
ttccaaattgatgggtggctt

SEQ ID NO: 4311 - DNA, 21 bp, synthetic construct
  source 1..21: mol_type = other DNA
  misc_feature 1..19: note = RNA
  misc_feature 20..21: note = DNA
accggcagcatcgacatgctt

SEQ ID NO: 4312 - DNA, 21 bp, synthetic construct
  source 1..21: mol_type = other DNA
  misc_feature 1..19: note = RNA
  misc_feature 20..21: note = DNA
ctggcttgcggcgcgaggctt

SEQ ID NO: 4313 - DNA, 21 bp, synthetic construct
  source 1..21: mol_type = other DNA
  misc_feature 1..19: note = RNA
  misc_feature 20..21: note = DNA
gtgtaagatagttaacatctt

SEQ ID NO: 4314 - DNA, 21 bp, synthetic construct
  source 1..21: mol_type = other DNA
  misc_feature 1..19: note = RNA
  misc_feature 20..21: note = DNA
aggattaggactgaagcgctt

SEQ ID NO: 4315 - DNA, 21 bp, synthetic construct
  source 1..21: mol_type = other DNA
  misc_feature 1..19: note = RNA
  misc_feature 20..21: note = DNA
aatgtgtaagatagttaactt

SEQ ID NO: 4316 - DNA, 21 bp, synthetic construct
  source 1..21: mol_type = other DNA
  misc_feature 1..19: note = RNA
  misc_feature 20..21: note = DNA
ggccagcctaagatcatgctt

SEQ ID NO: 4317 - DNA, 21 bp, synthetic construct
  source 1..21: mol_type = other DNA
  misc_feature 1..19: note = RNA
  misc_feature 20..21: note = DNA
agttccatttaaattgacctt

SEQ ID NO: 4318 - DNA, 21 bp, synthetic construct
  source 1..21: mol_type = other DNA
  misc_feature 1..19: note = RNA
  misc_feature 20..21: note = DNA
tccatttaaattgacttcctt

SEQ ID NO: 4319 - DNA, 21 bp, synthetic construct
  source 1..21: mol_type = other DNA
  misc_feature 1..19: note = RNA
  misc_feature 20..21: note = DNA
cccaccctcacgaggtgtctt

SEQ ID NO: 4320 - DNA, 21 bp, synthetic construct
  source 1..21: mol_type = other DNA
  misc_feature 1..19: note = RNA
  misc_feature 20..21: note = DNA
catcttagcttagctttcctt

SEQ ID NO: 4321 - DNA, 21 bp, synthetic construct
  source 1..21: mol_type = other DNA
  misc_feature 1..19: note = RNA
  misc_feature 20..21: note = DNA
acttagccccatgagtttctt

SEQ ID NO: 4322 - DNA, 21 bp, synthetic construct
  source 1..21: mol_type = other DNA
  misc_feature 1..19: note = RNA
  misc_feature 20..21: note = DNA
tcatggtttagggtgatcctt

SEQ ID NO: 4323 - DNA, 21 bp, synthetic construct
  source 1..21: mol_type = other DNA
  misc_feature 1..19: note = RNA
  misc_feature 20..21: note = DNA
gcctgaagcacaggattactt

SEQ ID NO: 4324 - DNA, 21 bp, synthetic construct
  source 1..21: mol_type = other DNA
  misc_feature 1..19: note = RNA
  misc_feature 20..21: note = DNA
catactgagggtgaaattctt

SEQ ID NO: 4325 - DNA, 21 bp, synthetic construct
  source 1..21: mol_type = other DNA
  misc_feature 1..19: note = RNA
  misc_feature 20..21: note = DNA
aagatcatggtttagggtctt

SEQ ID NO: 4326 - DNA, 21 bp, synthetic construct
  source 1..21: mol_type = other DNA
  misc_feature 1..19: note = RNA
  misc_feature 20..21: note = DNA
gggatctcccccttgtggctt

SEQ ID NO: 4327 - DNA, 21 bp, synthetic construct
  source 1..21: mol_type = other DNA
  misc_feature 1..19: note = RNA
  misc_feature 20..21: note = DNA
gaggaatgtgtaagatagctt

SEQ ID NO: 4328 - DNA, 21 bp, synthetic construct
  source 1..21: mol_type = other DNA
  misc_feature 1..19: note = RNA
  misc_feature 20..21: note = DNA
atcatggtttagggtgatctt

SEQ ID NO: 4329 - DNA, 21 bp, synthetic construct
  source 1..21: mol_type = other DNA
  misc_feature 1..19: note = RNA
  misc_feature 20..21: note = DNA
cagcatcgacatggtagactt

SEQ ID NO: 4330 - DNA, 21 bp, synthetic construct
  source 1..21: mol_type = other DNA
  misc_feature 1..19: note = RNA
  misc_feature 20..21: note = DNA
ggtgcaggcgtaggaatactt

SEQ ID NO: 4331 - DNA, 21 bp, synthetic construct
  source 1..21: mol_type = other DNA
  misc_feature 1..19: note = RNA
  misc_feature 20..21: note = DNA
aggaatgtgtaagatagtctt

SEQ ID NO: 4332 - DNA, 21 bp, synthetic construct
  source 1..21: mol_type = other DNA
  misc_feature 1..19: note = RNA
  misc_feature 20..21: note = DNA
catggtttagggtgatcactt

SEQ ID NO: 4333 - DNA, 21 bp, synthetic construct
  source 1..21: mol_type = other DNA
  misc_feature 1..19: note = RNA
  misc_feature 20..21: note = DNA
tccacccaagtcgccgtcctt

SEQ ID NO: 4334 - DNA, 21 bp, synthetic construct
  source 1..21: mol_type = other DNA
  misc_feature 1..19: note = RNA
  misc_feature 20..21: note = DNA
tcagtaatgaccctggttctt

SEQ ID NO: 4335 - DNA, 21 bp, synthetic construct
  source 1..21: mol_type = other DNA
  misc_feature 1..19: note = RNA
  misc_feature 20..21: note = DNA
ctgggactttagggctaactt

SEQ ID NO: 4336 - DNA, 21 bp, synthetic construct
  source 1..21: mol_type = other DNA
  misc_feature 1..19: note = RNA
  misc_feature 20..21: note = DNA
caggcgtaggaatatggactt

SEQ ID NO: 4337 - DNA, 21 bp, synthetic construct
  source 1..21: mol_type = other DNA
  misc_feature 1..19: note = RNA
  misc_feature 20..21: note = DNA
gcaggcgtaggaatatggctt

SEQ ID NO: 4338 - DNA, 21 bp, synthetic construct
  source 1..21: mol_type = other DNA
  misc_feature 1..19: note = RNA
  misc_feature 20..21: note = DNA
agccacgaggtcggggcgctt

SEQ ID NO: 4339 - DNA, 21 bp, synthetic construct
  source 1..21: mol_type = other DNA
  misc_feature 1..19: note = RNA
  misc_feature 20..21: note = DNA
aatcatgcctccctaagactt

SEQ ID NO: 4340 - DNA, 21 bp, synthetic construct
  source 1..21: mol_type = other DNA
  misc_feature 1..19: note = RNA
  misc_feature 20..21: note = DNA
taagccgttggcacctctctt

SEQ ID NO: 4341 - DNA, 21 bp, synthetic construct
  source 1..21: mol_type = other DNA
  misc_feature 1..19: note = RNA
  misc_feature 20..21: note = DNA
atcgacatggtagactcgctt

SEQ ID NO: 4342 - DNA, 21 bp, synthetic construct
  source 1..21: mol_type = other DNA
  misc_feature 1..19: note = RNA
  misc_feature 20..21: note = DNA
tcttcggtaattctgaggctt

SEQ ID NO: 4343 - DNA, 21 bp, synthetic construct
  source 1..21: mol_type = other DNA
  misc_feature 1..19: note = RNA
  misc_feature 20..21: note = DNA
aagtcgccagtggtgtctctt

SEQ ID NO: 4344 - DNA, 21 bp, synthetic construct
  source 1..21: mol_type = other DNA
  misc_feature 1..19: note = RNA
  misc_feature 20..21: note = DNA
ataaattgaaaaggcacgctt

SEQ ID NO: 4345 - DNA, 21 bp, synthetic construct
  source 1..21: mol_type = other DNA
  misc_feature 1..19: note = RNA
  misc_feature 20..21: note = DNA
gttagaggcccttggggtctt

SEQ ID NO: 4346 - DNA, 21 bp, synthetic construct
  source 1..21: mol_type = other DNA
  misc_feature 1..19: note = RNA
  misc_feature 20..21: note = DNA
aatcaggggatcgcagcgctt

SEQ ID NO: 4347 - DNA, 21 bp, synthetic construct
  source 1..21: mol_type = other DNA
  misc_feature 1..19: note = RNA
  misc_feature 20..21: note = DNA
taagatagttaacatgggctt

SEQ ID NO: 4348 - DNA, 21 bp, synthetic construct
  source 1..21: mol_type = other DNA
  misc_feature 1..19: note = RNA
  misc_feature 20..21: note = DNA
tgtaagatagttaacatgctt

SEQ ID NO: 4349 - DNA, 21 bp, synthetic construct
  source 1..21: mol_type = other DNA
  misc_feature 1..19: note = RNA
  misc_feature 20..21: note = DNA
cggccgcctgtccttggtctt

SEQ ID NO: 4350 - DNA, 21 bp, synthetic construct
  source 1..21: mol_type = other DNA
  misc_feature 1..19: note = RNA
  misc_feature 20..21: note = DNA
ttagaggcccttggggttctt

SEQ ID NO: 4351 - DNA, 21 bp, synthetic construct
  source 1..21: mol_type = other DNA
  misc_feature 1..19: note = RNA
  misc_feature 20..21: note = DNA
gggatcgcagcggctacactt

SEQ ID NO: 4352 - DNA, 21 bp, synthetic construct
  source 1..21: mol_type = other DNA
  misc_feature 1..19: note = RNA
  misc_feature 20..21: note = DNA
cacgaggtcggggcgaggctt

SEQ ID NO: 4353 - DNA, 50 bp, synthetic construct
  source 1..50: mol_type = other DNA
tttatgcctcatcctctgagtgctgaaggcttgctgtaggctgtatgctg

SEQ ID NO: 4354 - DNA, 54 bp, synthetic construct
  source 1..54: mol_type = other DNA
gtgctgggcggggggcggcgggccctcccgcagaacaccatgcgctcttcggaa

SEQ ID NO: 4355 - DNA, 100 bp, synthetic construct
  source 1..100: mol_type = other DNA
gaagcaaagaaggggcagagggagcccgtgagctgagtgggccagggactgggagaaggagtgaggaggcagggccggcatgcctctgctgctggccaga

SEQ ID NO: 4356 - DNA, 54 bp, synthetic construct
  source 1..54: mol_type = other DNA
gtgctgggcggggggcggcgggccctcccgcagaacaccatgcgctcttcggga

SEQ ID NO: 4357 - DNA, 54 bp, synthetic construct
  source 1..54: mol_type = other DNA
gtgctgggcggggggcggcgggccctcccgcagaacaccatgcgctccacggaa

SEQ ID NO: 4358 - DNA, 35 bp, synthetic construct
  source 1..35: mol_type = other DNA
gggccctcccgcagaacaccatgcgctccacggaa

SEQ ID NO: 4359 - DNA, 30 bp, synthetic construct
  source 1..30: mol_type = other DNA
ctcccgcagaacaccatgcgctccacggaa

SEQ ID NO: 4360 - DNA, 55 bp, synthetic construct
  source 1..55: mol_type = other DNA
gtgctgggcggggggcggcgggccctcccgcagaacaccatgcgctccacggaag

SEQ ID NO: 4361 - DNA, 54 bp, synthetic construct
  source 1..54: mol_type = other DNA
gtgctgggcggggggcggcgggccctcccgcagaacaccatgcgctcctcggaa

SEQ ID NO: 4362 - DNA, 10 bp, synthetic construct
  source 1..10: mol_type = other DNA
tgtgacctgg

SEQ ID NO: 4363 - DNA, 10 bp, synthetic construct
  source 1..10: mol_type = other DNA
tgtgatttgg

SEQ ID NO: 4364 - DNA, 10 bp, synthetic construct
  source 1..10: mol_type = other DNA
tataatttgg

SEQ ID NO: 4365 - DNA, 11 bp, synthetic construct
  source 1..11: mol_type = other DNA
cctgacccagt

SEQ ID NO: 4366 - DNA, 18 bp, synthetic construct
  source 1..18: mol_type = other DNA
gtctgcacctgtcactag

SEQ ID NO: 4367 - DNA, 10 bp, synthetic construct
  source 1..10: mol_type = other DNA
gtgacccaag

SEQ ID NO: 4368 - DNA, 15 bp, synthetic construct
  source 1..15: mol_type = other DNA
gtggccactgagaag

SEQ ID NO: 4369 - DNA, 10 bp, synthetic construct
  source 1..10: mol_type = other DNA
gtgacccaat

SEQ ID NO: 4370 - DNA, 10 bp, synthetic construct
  source 1..10: mol_type = other DNA
gtgacccaac

SEQ ID NO: 4371 - DNA, 15 bp, synthetic construct
  source 1..15: mol_type = other DNA
gtggccactgagaaa

SEQ ID NO: 4372 - DNA, 50 bp, synthetic construct
  source 1..50: mol_type = other DNA
agtgtatgatgcctgttactagcattcacatggaacaaattgctgccgtg

SEQ ID NO: 4373 - DNA, 52 bp, synthetic construct
  source 1..52: mol_type = other DNA
ctgaggagcgccttgacagcagccatgggagggccgccccctacctcagtga

SEQ ID NO: 4374 - DNA, 52 bp, synthetic construct
  source 1..52: mol_type = other DNA
ctgtggagcgccttgacagcagccatgggagggccgccccctacctcagtga

SEQ ID NO: 4375 - DNA, 100 bp, synthetic construct
  source 1..100: mol_type = other DNA
tggccgtgtagtgctacccagcgctggctgcctcctcagcattgcaattcctctcccatctgggcaccagtcagctaccctggtgggaatctgggtagcc

SEQ ID NO: 4376 - DNA, 99 bp, synthetic construct
  source 1..99: mol_type = other DNA
ggccgtgtagtgctacccagcgctggctgcctcctcagcattgcaattcctctcccatctgggcaccagtcagctaccctggtgggaatctgggtagcc

SEQ ID NO: 4377 - DNA, 54 bp, synthetic construct
  source 1..54: mol_type = other DNA
tcctgaggagcgccttgacagcagccatgggagggccgccccctacctcagtga

SEQ ID NO: 4378 - DNA, 35 bp, synthetic construct
  source 1..35: mol_type = other DNA
ctgaggagcgccttgacagcagccatgggagggcc

SEQ ID NO: 4379 - DNA, 52 bp, synthetic construct
  source 1..52: mol_type = other DNA
ctgcggagcgccttgacagcagccatgggagggccgccccctacctcagtga

SEQ ID NO: 4380 - DNA, 158 bp, synthetic construct
  source 1..158: mol_type = other DNA
gtgctgggcggggggcggcgggccctcccgcagaacaccatgcgctcttcggaagactggaagcgatgacaaccctgtgacctggtttgtcatcgcttccagtcttctgaggagcgccttgacagcagccatgggagggccgccccctacctcagtga

SEQ ID NO: 4381 - DNA, 158 bp, synthetic construct
  source 1..158: mol_type = other DNA
gtgctgggcggggggcggcgggccctcccgcagaacaccatgcgctcttcggaacttccgcgagaacgccaaccctgtgacctggtttggcgttctcgcggaagttctgaggagcgccttgacagcagccatgggagggccgccccctacctcagtga

SEQ ID NO: 4382 - DNA, 158 bp, synthetic construct
  source 1..158: mol_type = other DNA
gtgctgggcggggggcggcgggccctcccgcagaacaccatgcgctcttcggaagcatcgacatggtagactccctgtgacctggtagtctaccatgtcgatgcttctgaggagcgccttgacagcagccatgggagggccgccccctacctcagtga

SEQ ID NO: 4383 - DNA, 158 bp, synthetic construct
  source 1..158: mol_type = other DNA
gtgctgggcggggggcggcgggccctcccgcagaacaccatgcgctcttcggaagctcctcgcagttcggttccctgtgacctggtaaccgaactgcgaggagcttctgaggagcgccttgacagcagccatgggagggccgccccctacctcagtga

SEQ ID NO: 4384 - DNA, 158 bp, synthetic construct
  source 1..158: mol_type = other DNA
gtgctgggcggggggcggcgggccctcccgcagaacaccatgcgctcttcggaaggctttggctcgggacttccctgtgacctggtaagtcccgagccaaagccttctgaggagcgccttgacagcagccatgggagggccgccccctacctcagtga

SEQ ID NO: 4385 - DNA, 158 bp, synthetic construct
  source 1..158: mol_type = other DNA
gtgctgggcggggggcggcgggccctcccgcagaacaccatgcgctcttcggaagactggaagcgatgacaaacctgtgacctggtttgtcatcgcttccagtcttctgaggagcgccttgacagcagccatgggagggccgccccctacctcagtga

SEQ ID NO: 4386 - DNA, 158 bp, synthetic construct
  source 1..158: mol_type = other DNA
gtgctgggcggggggcggcgggccctcccgcagaacaccatgcgctcttcggaacttccgcgagaacgccaaacctgtgacctggtttggcgttctcgcggaagttctgaggagcgccttgacagcagccatgggagggccgccccctacctcagtga

SEQ ID NO: 4387 - DNA, 158 bp, synthetic construct
  source 1..158: mol_type = other DNA
gtgctgggcggggggcggcgggccctcccgcagaacaccatgcgctcttcggaagcatcgacatggtagactacctgtgacctggtagtctaccatgtcgatgcttctgaggagcgccttgacagcagccatgggagggccgccccctacctcagtga

SEQ ID NO: 4388 - DNA, 158 bp, synthetic construct
  source 1..158: mol_type = other DNA
gtgctgggcggggggcggcgggccctcccgcagaacaccatgcgctcttcggaagctcctcgcagttcggttgcctgtgacctggtaaccgaactgcgaggagcttctgaggagcgccttgacagcagccatgggagggccgccccctacctcagtga

SEQ ID NO: 4389 - DNA, 158 bp, synthetic construct
  source 1..158: mol_type = other DNA
gtgctgggcggggggcggcgggccctcccgcagaacaccatgcgctcttcggaaggctttggctcgggacttacctgtgacctggtaagtcccgagccaaagccttctgaggagcgccttgacagcagccatgggagggccgccccctacctcagtga

SEQ ID NO: 4390 - DNA, 158 bp, synthetic construct
  source 1..158: mol_type = other DNA
gtgctgggcggggggcggcgggccctcccgcagaacaccatgcgctcttcggaagactggaagcgatgacaatcctgtgatttggtttgtcatcgcttccagtcttctgaggagcgccttgacagcagccatgggagggccgccccctacctcagtga

SEQ ID NO: 4391 - DNA, 158 bp, synthetic construct
  source 1..158: mol_type = other DNA
gtgctgggcggggggcggcgggccctcccgcagaacaccatgcgctcttcggaacttccgcgagaacgccaatcctgtgatttggtttggcgttctcgcggaagttctgaggagcgccttgacagcagccatgggagggccgccccctacctcagtga

SEQ ID NO: 4392 - DNA, 158 bp, synthetic construct
  source 1..158: mol_type = other DNA
gtgctgggcggggggcggcgggccctcccgcagaacaccatgcgctcttcggaagcatcgacatggtagacttcctgtgatttggtagtctaccatgtcgatgcttctgaggagcgccttgacagcagccatgggagggccgccccctacctcagtga

SEQ ID NO: 4393 - DNA, 158 bp, synthetic construct
  source 1..158: mol_type = other DNA
gtgctgggcggggggcggcgggccctcccgcagaacaccatgcgctcttcggaagctcctcgcagttcggtttcctgtgatttggtaaccgaactgcgaggagcttctgaggagcgccttgacagcagccatgggagggccgccccctacctcagtga

SEQ ID NO: 4394 - DNA, 158 bp, synthetic construct
  source 1..158: mol_type = other DNA
gtgctgggcggggggcggcgggccctcccgcagaacaccatgcgctcttcggaaggctttggctcgggactttcctgtgatttggtaagtcccgagccaaagccttctgaggagcgccttgacagcagccatgggagggccgccccctacctcagtga

SEQ ID NO: 4395 - DNA, 158 bp, synthetic construct
  source 1..158: mol_type = other DNA
gtgctgggcggggggcggcgggccctcccgcagaacaccatgcgctcttcggaagactggaagggatgacaaccctgtgacctggtttgtcatcgcttccagtcttctgtggagcgccttgacagcagccatgggagggccgccccctacctcagtga

SEQ ID NO: 4396 - DNA, 158 bp, synthetic construct
  source 1..158: mol_type = other DNA
gtgctgggcggggggcggcgggccctcccgcagaacaccatgcgctcttcggaacttccgcgacaacgccaaccctgtgacctggtttggcgttctcgcggaagttctgtggagcgccttgacagcagccatgggagggccgccccctacctcagtga

SEQ ID NO: 4397 - DNA, 158 bp, synthetic construct
  source 1..158: mol_type = other DNA
gtgctgggcggggggcggcgggccctcccgcagaacaccatgcgctcttcggaagcatcgacaaggtagactccctgtgacctggtagtctaccatgtcgatgcttctgtggagcgccttgacagcagccatgggagggccgccccctacctcagtga

SEQ ID NO: 4398 - DNA, 158 bp, synthetic construct
  source 1..158: mol_type = other DNA
gtgctgggcggggggcggcgggccctcccgcagaacaccatgcgctcttcggaagctcctcgctgttcggttccctgtgacctggtaaccgaactgcgaggagcttctgtggagcgccttgacagcagccatgggagggccgccccctacctcagtga

SEQ ID NO: 4399 - DNA, 158 bp, synthetic construct
  source 1..158: mol_type = other DNA
gtgctgggcggggggcggcgggccctcccgcagaacaccatgcgctcttcggaaggctttggcacgggacttccctgtgacctggtaagtcccgagccaaagccttctgtggagcgccttgacagcagccatgggagggccgccccctacctcagtga

SEQ ID NO: 4400 - DNA, 158 bp, synthetic construct
  source 1..158: mol_type = other DNA
gtgctgggcggggggcggcgggccctcccgcagaacaccatgcgctcttcggaagactggaagcgatgacaagcctgtgacctggtttgtcatcgcttccagtcttctgtggagcgccttgacagcagccatgggagggccgccccctacctcagtga

SEQ ID NO: 4401 - DNA, 158 bp, synthetic construct
  source 1..158: mol_type = other DNA
gtgctgggcggggggcggcgggccctcccgcagaacaccatgcgctcttcggaacttccgcgagaacgccaagcctgtgacctggtttggcgttctcgcggaagttctgtggagcgccttgacagcagccatgggagggccgccccctacctcagtga

SEQ ID NO: 4402 - DNA, 158 bp, synthetic construct
  source 1..158: mol_type = other DNA
gtgctgggcggggggcggcgggccctcccgcagaacaccatgcgctcttcggaagcatcgacatggtagactgcctgtgacctggtagtctaccatgtcgatgcttctgtggagcgccttgacagcagccatgggagggccgccccctacctcagtga

SEQ ID NO: 4403 - DNA, 158 bp, synthetic construct
  source 1..158: mol_type = other DNA
gtgctgggcggggggcggcgggccctcccgcagaacaccatgcgctcttcggaagctcctcgcagttcggttgcctgtgacctggtaaccgaactgcgaggagcttctgtggagcgccttgacagcagccatgggagggccgccccctacctcagtga

SEQ ID NO: 4404 - DNA, 158 bp, synthetic construct
  source 1..158: mol_type = other DNA
gtgctgggcggggggcggcgggccctcccgcagaacaccatgcgctcttcggaaggctttggctcgggacttgcctgtgacctggtaagtcccgagccaaagccttctgtggagcgccttgacagcagccatgggagggccgccccctacctcagtga

SEQ ID NO: 4405 - DNA, 260 bp, synthetic construct
  source 1..260: mol_type = other DNA
gaagcaaagaaggggcagagggagcccgtgagctgagtgggccagggactgggagaaggagtgaggaggcagggccggcatgcctctgctgctggccagagactggaagcgatgacaatctgtctgcacctgtcactagtttgtcatcgcttccagtctttggccgtgtagtgctacccagcgctggctgcctcctcagcattgcaattcctctcccatctgggcaccagtcagctaccctggtgggaatctgggtagcc

SEQ ID NO: 4406 - DNA, 260 bp, synthetic construct
  source 1..260: mol_type = other DNA
gaagcaaagaaggggcagagggagcccgtgagctgagtgggccagggactgggagaaggagtgaggaggcagggccggcatgcctctgctgctggccagacttccgcgagaacgccaatctgtctgcacctgtcactagtttggcgttctcgcggaagtttggccgtgtagtgctacccagcgctggctgcctcctcagcattgcaattcctctcccatctgggcaccagtcagctaccctggtgggaatctgggtagcc

SEQ ID NO: 4407 - DNA, 260 bp, synthetic construct
  source 1..260: mol_type = other DNA
gaagcaaagaaggggcagagggagcccgtgagctgagtgggccagggactgggagaaggagtgaggaggcagggccggcatgcctctgctgctggccagagcatcgacatggtagacttctgtctgcacctgtcactagtagtctaccatgtcgatgctttggccgtgtagtgctacccagcgctggctgcctcctcagcattgcaattcctctcccatctgggcaccagtcagctaccctggtgggaatctgggtagcc

SEQ ID NO: 4408 - DNA, 260 bp, synthetic construct
  source 1..260: mol_type = other DNA
gaagcaaagaaggggcagagggagcccgtgagctgagtgggccagggactgggagaaggagtgaggaggcagggccggcatgcctctgctgctggccagagctcctcgcagttcggtttctgtctgcacctgtcactagtaaccgaactgcgaggagctttggccgtgtagtgctacccagcgctggctgcctcctcagcattgcaattcctctcccatctgggcaccagtcagctaccctggtgggaatctgggtagcc

SEQ ID NO: 4409 - DNA, 260 bp, synthetic construct
  source 1..260: mol_type = other DNA
gaagcaaagaaggggcagagggagcccgtgagctgagtgggccagggactgggagaaggagtgaggaggcagggccggcatgcctctgctgctggccagaggctttggctcgggactttctgtctgcacctgtcactagtaagtcccgagccaaagcctttggccgtgtagtgctacccagcgctggctgcctcctcagcattgcaattcctctcccatctgggcaccagtcagctaccctggtgggaatctgggtagcc

SEQ ID NO: 4410 - DNA, 19 bp, synthetic construct
  source 1..19: mol_type = other DNA
gactggaagcgatgacaac

SEQ ID NO: 4411 - DNA, 19 bp, synthetic construct
  source 1..19: mol_type = other DNA
cttccgcgagaacgccaac

SEQ ID NO: 4412 - DNA, 19 bp, synthetic construct
  source 1..19: mol_type = other DNA
gcatcgacatggtagactc

SEQ ID NO: 4413 - DNA, 19 bp, synthetic construct
  source 1..19: mol_type = other DNA
gctcctcgcagttcggttc

SEQ ID NO: 4414 - DNA, 19 bp, synthetic construct
  source 1..19: mol_type = other DNA
ggctttggctcgggacttc

SEQ ID NO: 4415 - DNA, 19 bp, synthetic construct
  source 1..19: mol_type = other DNA
gactggaagcgatgacaaa

SEQ ID NO: 4416 - DNA, 19 bp, synthetic construct
  source 1..19: mol_type = other DNA
cttccgcgagaacgccaaa

SEQ ID NO: 4417 - DNA, 19 bp, synthetic construct
  source 1..19: mol_type = other DNA
gcatcgacatggtagacta

SEQ ID NO: 4418 - DNA, 19 bp, synthetic construct
  source 1..19: mol_type = other DNA
gctcctcgcagttcggttg

SEQ ID NO: 4419 - DNA, 19 bp, synthetic construct
  source 1..19: mol_type = other DNA
ggctttggctcgggactta

SEQ ID NO: 4420 - DNA, 19 bp, synthetic construct
  source 1..19: mol_type = other DNA
gactggaagcgatgacaat

SEQ ID NO: 4421 - DNA, 19 bp, synthetic construct
  source 1..19: mol_type = other DNA
cttccgcgagaacgccaat

SEQ ID NO: 4422 - DNA, 19 bp, synthetic construct
  source 1..19: mol_type = other DNA
gcatcgacatggtagactt

SEQ ID NO: 4423 - DNA, 19 bp, synthetic construct
  source 1..19: mol_type = other DNA
gctcctcgcagttcggttt

SEQ ID NO: 4424 - DNA, 19 bp, synthetic construct
  source 1..19: mol_type = other DNA
ggctttggctcgggacttt

SEQ ID NO: 4425 - DNA, 19 bp, synthetic construct
  source 1..19: mol_type = other DNA
gactggaagggatgacaac

SEQ ID NO: 4426 - DNA, 19 bp, synthetic construct
  source 1..19: mol_type = other DNA
cttccgcgacaacgccaac

SEQ ID NO: 4427 - DNA, 19 bp, synthetic construct
  source 1..19: mol_type = other DNA
gcatcgacaaggtagactc

SEQ ID NO: 4428 - DNA, 19 bp, synthetic construct
  source 1..19: mol_type = other DNA
gctcctcgctgttcggttc

SEQ ID NO: 4429 - DNA, 19 bp, synthetic construct
  source 1..19: mol_type = other DNA
ggctttggcacgggacttc

SEQ ID NO: 4430 - DNA, 19 bp, synthetic construct
  source 1..19: mol_type = other DNA
gactggaagcgatgacaag

SEQ ID NO: 4431 - DNA, 19 bp, synthetic construct
  source 1..19: mol_type = other DNA
cttccgcgagaacgccaag

SEQ ID NO: 4432 - DNA, 19 bp, synthetic construct
  source 1..19: mol_type = other DNA
gcatcgacatggtagactg

SEQ ID NO: 4433 - DNA, 19 bp, synthetic construct
  source 1..19: mol_type = other DNA
ggctttggctcgggacttg

SEQ ID NO: 4434 - DNA, 19 bp, synthetic construct
  source 1..19: mol_type = other DNA
tttgtcatcgcttccagtc

SEQ ID NO: 4435 - DNA, 19 bp, synthetic construct
  source 1..19: mol_type = other DNA
tttggcgttctcgcggaag

SEQ ID NO: 4436 - DNA, 19 bp, synthetic construct
  source 1..19: mol_type = other DNA
tagtctaccatgtcgatgc

SEQ ID NO: 4437 - DNA, 19 bp, synthetic construct
  source 1..19: mol_type = other DNA
taaccgaactgcgaggagc

SEQ ID NO: 4438 - DNA, 19 bp, synthetic construct
  source 1..19: mol_type = other DNA
taagtcccgagccaaagcc

SEQ ID NO: 4439 - DNA, 2289 bp, synthetic construct
  source 1..2289: mol_type = other DNA
cctgcaggcagctgcgcgctcgctcgctcactgaggccgcccgggcaaagcccgggcgtcgggcgacctttggtcgcccggcctcagtgagcgagcgagcgcgcagagagggagtggccaactccatcactaggggttccttgtagttaatgattaacccgccatgctacttatctacgtagccatgcgtcgacataacgcgtcgacattgattattgactagttattaatagtaatcaattacggggtcattagttcatagcccatatatggagttccgcgttacataacttacggtaaatggcccgcctggctgaccgcccaacgacccccgcccattgacgtcaataatgacgtatgttcccatagtaacgccaatagggactttccattgacgtcaatgggtggagtatttacggtaaactgcccacttggcagtacatcaagtgtatcatatgccaagtacgccccctattgacgtcaatgacggtaaatggcccgcctggcattatgcccagtacatgaccttatgggactttcctacttggcagtacatctacgtattagtcatcgctattaccatgtcgaggccacgttctgcttcactctccccatctcccccccctccccacccccaattttgtatttatttattttttaattattttgtgcagcgatgggggcggggggggggggcgcgcgccaggcggggcggggcggggcgaggggcggggcggggcgaggcggagaggtgcggcggcagccaatcagagcggcgcgctccgaaagtttccttttatggcgaggcggcggcggcggcggccctataaaaagcgaagcgcgcggcgggcgggagcaagcttcgtttagtgaaccgtcagatcgcctggagacgccatccacgctgttttgacctccatagaagacaccgggaccgatccagcctccgcggattcgaatcccggccgggaacggtgcattggaacgcggattccccgtgccaagagtgacgtaagtaccgcctatagagtctataggcccacaaaaaatgctttcttcttttaatatacttttttgtttatcttatttctaatactttccctaatctctttctttcagggcaataatgatacaatgtatcatgcctctttgcaccattctaaagaataacagtgataatttctgggttaaggcaatagcaatatttctgcatataaatatttctgcatataaattgtaactgatgtaagaggtttcatattgctaatagcagctacaatccagctaccattctgcttttattttatggttgggataaggctggattattctgagtccaagctaggcccttttgctaatcatgttcatacctcttatcttcctcccacagctcctgggcaacgtgctggtctgtgtgctggcccatcactttggcaaagaattgggattcgaaccggtgtgctgggcggggggcggcgggccctcccgcagaacaccatgcgctcttcggaagactggaagcgatgacaaccctgtgacctggtttgtcatcgcttccagtcttctgaggagcgccttgacagcagccatgggagggccgccccctacctcagtgactcgaggggtggcatccctgtgacccctccccagtgcctctcctggccctggaagttgccactccagtgcccaccagccttgtcctaataaaattaagttgcatcattttgtctgactaggtgtccttctataatattatggggtggaggggggtggtatggagcaaggggcaagttgggaagacaacctgtagggcctgcggggtctattgggaaccaagctggagtgcagtggcacaatcttggctcactgcaatctccgcctcctgggttcaagcgattctcctgcctcagcctcccgagttgttgggattccaggcatgcatgaccaggctcagctaatttttgtttttttggtagagacggggtttcaccatattggccaggctggtctccaactcctaatctcaggtgatctacccaccttggcctcccaaattgctgggattacaggcgtgaaccactgctcccttccctgtccttatcgatgctacgtagataagtagcatggcgggttaatcattaactacagaggaacccctagtgatggagttggccactccctctctgcgcgctcgctcgctcactgaggccgggcgaccaaaggtcgcccgacgcccgggctttgcccgggcggcctcagtgagcgagcgagcgcgcagctgcctgcagg

SEQ ID NO: 4440 - DNA, 2289 bp, synthetic construct
  source 1..2289: mol_type = other DNA
cctgcaggcagctgcgcgctcgctcgctcactgaggccgcccgggcaaagcccgggcgtcgggcgacctttggtcgcccggcctcagtgagcgagcgagcgcgcagagagggagtggccaactccatcactaggggttccttgtagttaatgattaacccgccatgctacttatctacgtagccatgcgtcgacataacgcgtcgacattgattattgactagttattaatagtaatcaattacggggtcattagttcatagcccatatatggagttccgcgttacataacttacggtaaatggcccgcctggctgaccgcccaacgacccccgcccattgacgtcaataatgacgtatgttcccatagtaacgccaatagggactttccattgacgtcaatgggtggagtatttacggtaaactgcccacttggcagtacatcaagtgtatcatatgccaagtacgccccctattgacgtcaatgacggtaaatggcccgcctggcattatgcccagtacatgaccttatgggactttcctacttggcagtacatctacgtattagtcatcgctattaccatgtcgaggccacgttctgcttcactctccccatctcccccccctccccacccccaattttgtatttatttattttttaattattttgtgcagcgatgggggcggggggggggggcgcgcgccaggcggggcggggcggggcgaggggcggggcggggcgaggcggagaggtgcggcggcagccaatcagagcggcgcgctccgaaagtttccttttatggcgaggcggcggcggcggcggccctataaaaagcgaagcgcgcggcgggcgggagcaagcttcgtttagtgaaccgtcagatcgcctggagacgccatccacgctgttttgacctccatagaagacaccgggaccgatccagcctccgcggattcgaatcccggccgggaacggtgcattggaacgcggattccccgtgccaagagtgacgtaagtaccgcctatagagtctataggcccacaaaaaatgctttcttcttttaatatacttttttgtttatcttatttctaatactttccctaatctctttctttcagggcaataatgatacaatgtatcatgcctctttgcaccattctaaagaataacagtgataatttctgggttaaggcaatagcaatatttctgcatataaatatttctgcatataaattgtaactgatgtaagaggtttcatattgctaatagcagctacaatccagctaccattctgcttttattttatggttgggataaggctggattattctgagtccaagctaggcccttttgctaatcatgttcatacctcttatcttcctcccacagctcctgggcaacgtgctggtctgtgtgctggcccatcactttggcaaagaattgggattcgaaccggtgtgctgggcggggggcggcgggccctcccgcagaacaccatgcgctcttcggaacttccgcgagaacgccaaccctgtgacctggtttggcgttctcgcggaagttctgaggagcgccttgacagcagccatgggagggccgccccctacctcagtgactcgaggggtggcatccctgtgacccctccccagtgcctctcctggccctggaagttgccactccagtgcccaccagccttgtcctaataaaattaagttgcatcattttgtctgactaggtgtccttctataatattatggggtggaggggggtggtatggagcaaggggcaagttgggaagacaacctgtagggcctgcggggtctattgggaaccaagctggagtgcagtggcacaatcttggctcactgcaatctccgcctcctgggttcaagcgattctcctgcctcagcctcccgagttgttgggattccaggcatgcatgaccaggctcagctaatttttgtttttttggtagagacggggtttcaccatattggccaggctggtctccaactcctaatctcaggtgatctacccaccttggcctcccaaattgctgggattacaggcgtgaaccactgctcccttccctgtccttatcgatgctacgtagataagtagcatggcgggttaatcattaactacagaggaacccctagtgatggagttggccactccctctctgcgcgctcgctcgctcactgaggccgggcgaccaaaggtcgcccgacgcccgggctttgcccgggcggcctcagtgagcgagcgagcgcgcagctgcctgcagg

SEQ ID NO: 4441 - DNA, 2289 bp, synthetic construct
  source 1..2289: mol_type = other DNA
cctgcaggcagctgcgcgctcgctcgctcactgaggccgcccgggcaaagcccgggcgtcgggcgacctttggtcgcccggcctcagtgagcgagcgagcgcgcagagagggagtggccaactccatcactaggggttccttgtagttaatgattaacccgccatgctacttatctacgtagccatgcgtcgacataacgcgtcgacattgattattgactagttattaatagtaatcaattacggggtcattagttcatagcccatatatggagttccgcgttacataacttacggtaaatggcccgcctggctgaccgcccaacgacccccgcccattgacgtcaataatgacgtatgttcccatagtaacgccaatagggactttccattgacgtcaatgggtggagtatttacggtaaactgcccacttggcagtacatcaagtgtatcatatgccaagtacgccccctattgacgtcaatgacggtaaatggcccgcctggcattatgcccagtacatgaccttatgggactttcctacttggcagtacatctacgtattagtcatcgctattaccatgtcgaggccacgttctgcttcactctccccatctcccccccctccccacccccaattttgtatttatttattttttaattattttgtgcagcgatgggggcggggggggggggcgcgcgccaggcggggcggggcggggcgaggggcggggcggggcgaggcggagaggtgcggcggcagccaatcagagcggcgcgctccgaaagtttccttttatggcgaggcggcggcggcggcggccctataaaaagcgaagcgcgcggcgggcgggagcaagcttcgtttagtgaaccgtcagatcgcctggagacgccatccacgctgttttgacctccatagaagacaccgggaccgatccagcctccgcggattcgaatcccggccgggaacggtgcattggaacgcggattccccgtgccaagagtgacgtaagtaccgcctatagagtctataggcccacaaaaaatgctttcttcttttaatatacttttttgtttatcttatttctaatactttccctaatctctttctttcagggcaataatgatacaatgtatcatgcctctttgcaccattctaaagaataacagtgataatttctgggttaaggcaatagcaatatttctgcatataaatatttctgcatataaattgtaactgatgtaagaggtttcatattgctaatagcagctacaatccagctaccattctgcttttattttatggttgggataaggctggattattctgagtccaagctaggcccttttgctaatcatgttcatacctcttatcttcctcccacagctcctgggcaacgtgctggtctgtgtgctggcccatcactttggcaaagaattgggattcgaaccggtgtgctgggcggggggcggcgggccctcccgcagaacaccatgcgctcttcggaagcatcgacatggtagactccctgtgacctggtagtctaccatgtcgatgcttctgaggagcgccttgacagcagccatgggagggccgccccctacctcagtgactcgaggggtggcatccctgtgacccctccccagtgcctctcctggccctggaagttgccactccagtgcccaccagccttgtcctaataaaattaagttgcatcattttgtctgactaggtgtccttctataatattatggggtggaggggggtggtatggagcaaggggcaagttgggaagacaacctgtagggcctgcggggtctattgggaaccaagctggagtgcagtggcacaatcttggctcactgcaatctccgcctcctgggttcaagcgattctcctgcctcagcctcccgagttgttgggattccaggcatgcatgaccaggctcagctaatttttgtttttttggtagagacggggtttcaccatattggccaggctggtctccaactcctaatctcaggtgatctacccaccttggcctcccaaattgctgggattacaggcgtgaaccactgctcccttccctgtccttatcgatgctacgtagataagtagcatggcgggttaatcattaactacagaggaacccctagtgatggagttggccactccctctctgcgcgctcgctcgctcactgaggccgggcgaccaaaggtcgcccgacgcccgggctttgcccgggcggcctcagtgagcgagcgagcgcgcagctgcctgcagg

SEQ ID NO: 4442 - DNA, 2289 bp, synthetic construct
  source 1..2289: mol_type = other DNA
cctgcaggcagctgcgcgctcgctcgctcactgaggccgcccgggcaaagcccgggcgtcgggcgacctttggtcgcccggcctcagtgagcgagcgagcgcgcagagagggagtggccaactccatcactaggggttccttgtagttaatgattaacccgccatgctacttatctacgtagccatgcgtcgacataacgcgtcgacattgattattgactagttattaatagtaatcaattacggggtcattagttcatagcccatatatggagttccgcgttacataacttacggtaaatggcccgcctggctgaccgcccaacgacccccgcccattgacgtcaataatgacgtatgttcccatagtaacgccaatagggactttccattgacgtcaatgggtggagtatttacggtaaactgcccacttggcagtacatcaagtgtatcatatgccaagtacgccccctattgacgtcaatgacggtaaatggcccgcctggcattatgcccagtacatgaccttatgggactttcctacttggcagtacatctacgtattagtcatcgctattaccatgtcgaggccacgttctgcttcactctccccatctcccccccctccccacccccaattttgtatttatttattttttaattattttgtgcagcgatgggggcggggggggggggcgcgcgccaggcggggcggggcggggcgaggggcggggcggggcgaggcggagaggtgcggcggcagccaatcagagcggcgcgctccgaaagtttccttttatggcgaggcggcggcggcggcggccctataaaaagcgaagcgcgcggcgggcgggagcaagcttcgtttagtgaaccgtcagatcgcctggagacgccatccacgctgttttgacctccatagaagacaccgggaccgatccagcctccgcggattcgaatcccggccgggaacggtgcattggaacgcggattccccgtgccaagagtgacgtaagtaccgcctatagagtctataggcccacaaaaaatgctttcttcttttaatatacttttttgtttatcttatttctaatactttccctaatctctttctttcagggcaataatgatacaatgtatcatgcctctttgcaccattctaaagaataacagtgataatttctgggttaaggcaatagcaatatttctgcatataaatatttctgcatataaattgtaactgatgtaagaggtttcatattgctaatagcagctacaatccagctaccattctgcttttattttatggttgggataaggctggattattctgagtccaagctaggcccttttgctaatcatgttcatacctcttatcttcctcccacagctcctgggcaacgtgctggtctgtgtgctggcccatcactttggcaaagaattgggattcgaaccggtgtgctgggcggggggcggcgggccctcccgcagaacaccatgcgctcttcggaagctcctcgcagttcggttccctgtgacctggtaaccgaactgcgaggagcttctgaggagcgccttgacagcagccatgggagggccgccccctacctcagtgactcgaggggtggcatccctgtgacccctccccagtgcctctcctggccctggaagttgccactccagtgcccaccagccttgtcctaataaaattaagttgcatcattttgtctgactaggtgtccttctataatattatggggtggaggggggtggtatggagcaaggggcaagttgggaagacaacctgtagggcctgcggggtctattgggaaccaagctggagtgcagtggcacaatcttggctcactgcaatctccgcctcctgggttcaagcgattctcctgcctcagcctcccgagttgttgggattccaggcatgcatgaccaggctcagctaatttttgtttttttggtagagacggggtttcaccatattggccaggctggtctccaactcctaatctcaggtgatctacccaccttggcctcccaaattgctgggattacaggcgtgaaccactgctcccttccctgtccttatcgatgctacgtagataagtagcatggcgggttaatcattaactacagaggaacccctagtgatggagttggccactccctctctgcgcgctcgctcgctcactgaggccgggcgaccaaaggtcgcccgacgcccgggctttgcccgggcggcctcagtgagcgagcgagcgcgcagctgcctgcagg

SEQ ID NO: 4443 - DNA, 2289 bp, synthetic construct
  source 1..2289: mol_type = other DNA
cctgcaggcagctgcgcgctcgctcgctcactgaggccgcccgggcaaagcccgggcgtcgggcgacctttggtcgcccggcctcagtgagcgagcgagcgcgcagagagggagtggccaactccatcactaggggttccttgtagttaatgattaacccgccatgctacttatctacgtagccatgcgtcgacataacgcgtcgacattgattattgactagttattaatagtaatcaattacggggtcattagttcatagcccatatatggagttccgcgttacataacttacggtaaatggcccgcctggctgaccgcccaacgacccccgcccattgacgtcaataatgacgtatgttcccatagtaacgccaatagggactttccattgacgtcaatgggtggagtatttacggtaaactgcccacttggcagtacatcaagtgtatcatatgccaagtacgccccctattgacgtcaatgacggtaaatggcccgcctggcattatgcccagtacatgaccttatgggactttcctacttggcagtacatctacgtattagtcatcgctattaccatgtcgaggccacgttctgcttcactctccccatctcccccccctccccacccccaattttgtatttatttattttttaattattttgtgcagcgatgggggcggggggggggggcgcgcgccaggcggggcggggcggggcgaggggcggggcggggcgaggcggagaggtgcggcggcagccaatcagagcggcgcgctccgaaagtttccttttatggcgaggcggcggcggcggcggccctataaaaagcgaagcgcgcggcgggcgggagcaagcttcgtttagtgaaccgtcagatcgcctggagacgccatccacgctgttttgacctccatagaagacaccgggaccgatccagcctccgcggattcgaatcccggccgggaacggtgcattggaacgcggattccccgtgccaagagtgacgtaagtaccgcctatagagtctataggcccacaaaaaatgctttcttcttttaatatacttttttgtttatcttatttctaatactttccctaatctctttctttcagggcaataatgatacaatgtatcatgcctctttgcaccattctaaagaataacagtgataatttctgggttaaggcaatagcaatatttctgcatataaatatttctgcatataaattgtaactgatgtaagaggtttcatattgctaatagcagctacaatccagctaccattctgcttttattttatggttgggataaggctggattattctgagtccaagctaggcccttttgctaatcatgttcatacctcttatcttcctcccacagctcctgggcaacgtgctggtctgtgtgctggcccatcactttggcaaagaattgggattcgaaccggtgtgctgggcggggggcggcgggccctcccgcagaacaccatgcgctcttcggaaggctttggctcgggacttccctgtgacctggtaagtcccgagccaaagccttctgaggagcgccttgacagcagccatgggagggccgccccctacctcagtgactcgaggggtggcatccctgtgacccctccccagtgcctctcctggccctggaagttgccactccagtgcccaccagccttgtcctaataaaattaagttgcatcattttgtctgactaggtgtccttctataatattatggggtggaggggggtggtatggagcaaggggcaagttgggaagacaacctgtagggcctgcggggtctattgggaaccaagctggagtgcagtggcacaatcttggctcactgcaatctccgcctcctgggttcaagcgattctcctgcctcagcctcccgagttgttgggattccaggcatgcatgaccaggctcagctaatttttgtttttttggtagagacggggtttcaccatattggccaggctggtctccaactcctaatctcaggtgatctacccaccttggcctcccaaattgctgggattacaggcgtgaaccactgctcccttccctgtccttatcgatgctacgtagataagtagcatggcgggttaatcattaactacagaggaacccctagtgatggagttggccactccctctctgcgcgctcgctcgctcactgaggccgggcgaccaaaggtcgcccgacgcccgggctttgcccgggcggcctcagtgagcgagcgagcgcgcagctgcctgcagg

SEQ ID NO: 4444 - DNA, 2289 bp, synthetic construct
  source 1..2289: mol_type = other DNA
cctgcaggcagctgcgcgctcgctcgctcactgaggccgcccgggcaaagcccgggcgtcgggcgacctttggtcgcccggcctcagtgagcgagcgagcgcgcagagagggagtggccaactccatcactaggggttccttgtagttaatgattaacccgccatgctacttatctacgtagccatgcgtcgacataacgcgtcgacattgattattgactagttattaatagtaatcaattacggggtcattagttcatagcccatatatggagttccgcgttacataacttacggtaaatggcccgcctggctgaccgcccaacgacccccgcccattgacgtcaataatgacgtatgttcccatagtaacgccaatagggactttccattgacgtcaatgggtggagtatttacggtaaactgcccacttggcagtacatcaagtgtatcatatgccaagtacgccccctattgacgtcaatgacggtaaatggcccgcctggcattatgcccagtacatgaccttatgggactttcctacttggcagtacatctacgtattagtcatcgctattaccatgtcgaggccacgttctgcttcactctccccatctcccccccctccccacccccaattttgtatttatttattttttaattattttgtgcagcgatgggggcggggggggggggcgcgcgccaggcggggcggggcggggcgaggggcggggcggggcgaggcggagaggtgcggcggcagccaatcagagcggcgcgctccgaaagtttccttttatggcgaggcggcggcggcggcggccctataaaaagcgaagcgcgcggcgggcgggagcaagcttcgtttagtgaaccgtcagatcgcctggagacgccatccacgctgttttgacctccatagaagacaccgggaccgatccagcctccgcggattcgaatcccggccgggaacggtgcattggaacgcggattccccgtgccaagagtgacgtaagtaccgcctatagagtctataggcccacaaaaaatgctttcttcttttaatatacttttttgtttatcttatttctaatactttccctaatctctttctttcagggcaataatgatacaatgtatcatgcctctttgcaccattctaaagaataacagtgataatttctgggttaaggcaatagcaatatttctgcatataaatatttctgcatataaattgtaactgatgtaagaggtttcatattgctaatagcagctacaatccagctaccattctgcttttattttatggttgggataaggctggattattctgagtccaagctaggcccttttgctaatcatgttcatacctcttatcttcctcccacagctcctgggcaacgtgctggtctgtgtgctggcccatcactttggcaaagaattgggattcgaaccggtgtgctgggcggggggcggcgggccctcccgcagaacaccatgcgctcttcggaagactggaagcgatgacaaacctgtgacctggtttgtcatcgcttccagtcttctgaggagcgccttgacagcagccatgggagggccgccccctacctcagtgactcgaggggtggcatccctgtgacccctccccagtgcctctcctggccctggaagttgccactccagtgcccaccagccttgtcctaataaaattaagttgcatcattttgtctgactaggtgtccttctataatattatggggtggaggggggtggtatggagcaaggggcaagttgggaagacaacctgtagggcctgcggggtctattgggaaccaagctggagtgcagtggcacaatcttggctcactgcaatctccgcctcctgggttcaagcgattctcctgcctcagcctcccgagttgttgggattccaggcatgcatgaccaggctcagctaatttttgtttttttggtagagacggggtttcaccatattggccaggctggtctccaactcctaatctcaggtgatctacccaccttggcctcccaaattgctgggattacaggcgtgaaccactgctcccttccctgtccttatcgatgctacgtagataagtagcatggcgggttaatcattaactacagaggaacccctagtgatggagttggccactccctctctgcgcgctcgctcgctcactgaggccgggcgaccaaaggtcgcccgacgcccgggctttgcccgggcggcctcagtgagcgagcgagcgcgcagctgcctgcagg

SEQ ID NO: 4445 - DNA, 2289 bp, synthetic construct
  source 1..2289: mol_type = other DNA
cctgcaggcagctgcgcgctcgctcgctcactgaggccgcccgggcaaagcccgggcgtcgggcgacctttggtcgcccggcctcagtgagcgagcgagcgcgcagagagggagtggccaactccatcactaggggttccttgtagttaatgattaacccgccatgctacttatctacgtagccatgcgtcgacataacgcgtcgacattgattattgactagttattaatagtaatcaattacggggtcattagttcatagcccatatatggagttccgcgttacataacttacggtaaatggcccgcctggctgaccgcccaacgacccccgcccattgacgtcaataatgacgtatgttcccatagtaacgccaatagggactttccattgacgtcaatgggtggagtatttacggtaaactgcccacttggcagtacatcaagtgtatcatatgccaagtacgccccctattgacgtcaatgacggtaaatggcccgcctggcattatgcccagtacatgaccttatgggactttcctacttggcagtacatctacgtattagtcatcgctattaccatgtcgaggccacgttctgcttcactctccccatctcccccccctccccacccccaattttgtatttatttattttttaattattttgtgcagcgatgggggcggggggggggggcgcgcgccaggcggggcggggcggggcgaggggcggggcggggcgaggcggagaggtgcggcggcagccaatcagagcggcgcgctccgaaagtttccttttatggcgaggcggcggcggcggcggccctataaaaagcgaagcgcgcggcgggcgggagcaagcttcgtttagtgaaccgtcagatcgcctggagacgccatccacgctgttttgacctccatagaagacaccgggaccgatccagcctccgcggattcgaatcccggccgggaacggtgcattggaacgcggattccccgtgccaagagtgacgtaagtaccgcctatagagtctataggcccacaaaaaatgctttcttcttttaatatacttttttgtttatcttatttctaatactttccctaatctctttctttcagggcaataatgatacaatgtatcatgcctctttgcaccattctaaagaataacagtgataatttctgggttaaggcaatagcaatatttctgcatataaatatttctgcatataaattgtaactgatgtaagaggtttcatattgctaatagcagctacaatccagctaccattctgcttttattttatggttgggataaggctggattattctgagtccaagctaggcccttttgctaatcatgttcatacctcttatcttcctcccacagctcctgggcaacgtgctggtctgtgtgctggcccatcactttggcaaagaattgggattcgaaccggtgtgctgggcggggggcggcgggccctcccgcagaacaccatgcgctcttcggaacttccgcgagaacgccaaacctgtgacctggtttggcgttctcgcggaagttctgaggagcgccttgacagcagccatgggagggccgccccctacctcagtgactcgaggggtggcatccctgtgacccctccccagtgcctctcctggccctggaagttgccactccagtgcccaccagccttgtcctaataaaattaagttgcatcattttgtctgactaggtgtccttctataatattatggggtggaggggggtggtatggagcaaggggcaagttgggaagacaacctgtagggcctgcggggtctattgggaaccaagctggagtgcagtggcacaatcttggctcactgcaatctccgcctcctgggttcaagcgattctcctgcctcagcctcccgagttgttgggattccaggcatgcatgaccaggctcagctaatttttgtttttttggtagagacggggtttcaccatattggccaggctggtctccaactcctaatctcaggtgatctacccaccttggcctcccaaattgctgggattacaggcgtgaaccactgctcccttccctgtccttatcgatgctacgtagataagtagcatggcgggttaatcattaactacagaggaacccctagtgatggagttggccactccctctctgcgcgctcgctcgctcactgaggccgggcgaccaaaggtcgcccgacgcccgggctttgcccgggcggcctcagtgagcgagcgagcgcgcagctgcctgcagg

SEQ ID NO: 4446 - DNA, 2289 bp, synthetic construct
  source 1..2289: mol_type = other DNA
cctgcaggcagctgcgcgctcgctcgctcactgaggccgcccgggcaaagcccgggcgtcgggcgacctttggtcgcccggcctcagtgagcgagcgagcgcgcagagagggagtggccaactccatcactaggggttccttgtagttaatgattaacccgccatgctacttatctacgtagccatgcgtcgacataacgcgtcgacattgattattgactagttattaatagtaatcaattacggggtcattagttcatagcccatatatggagttccgcgttacataacttacggtaaatggcccgcctggctgaccgcccaacgacccccgcccattgacgtcaataatgacgtatgttcccatagtaacgccaatagggactttccattgacgtcaatgggtggagtatttacggtaaactgcccacttggcagtacatcaagtgtatcatatgccaagtacgccccctattgacgtcaatgacggtaaatggcccgcctggcattatgcccagtacatgaccttatgggactttcctacttggcagtacatctacgtattagtcatcgctattaccatgtcgaggccacgttctgcttcactctccccatctcccccccctccccacccccaattttgtatttatttattttttaattattttgtgcagcgatgggggcggggggggggggcgcgcgccaggcggggcggggcggggcgaggggcggggcggggcgaggcggagaggtgcggcggcagccaatcagagcggcgcgctccgaaagtttccttttatggcgaggcggcggcggcggcggccctataaaaagcgaagcgcgcggcgggcgggagcaagcttcgtttagtgaaccgtcagatcgcctggagacgccatccacgctgttttgacctccatagaagacaccgggaccgatccagcctccgcggattcgaatcccggccgggaacggtgcattggaacgcggattccccgtgccaagagtgacgtaagtaccgcctatagagtctataggcccacaaaaaatgctttcttcttttaatatacttttttgtttatcttatttctaatactttccctaatctctttctttcagggcaataatgatacaatgtatcatgcctctttgcaccattctaaagaataacagtgataatttctgggttaaggcaatagcaatatttctgcatataaatatttctgcatataaattgtaactgatgtaagaggtttcatattgctaatagcagctacaatccagctaccattctgcttttattttatggttgggataaggctggattattctgagtccaagctaggcccttttgctaatcatgttcatacctcttatcttcctcccacagctcctgggcaacgtgctggtctgtgtgctggcccatcactttggcaaagaattgggattcgaaccggtgtgctgggcggggggcggcgggccctcccgcagaacaccatgcgctcttcggaagcatcgacatggtagactacctgtgacctggtagtctaccatgtcgatgcttctgaggagcgccttgacagcagccatgggagggccgccccctacctcagtgactcgaggggtggcatccctgtgacccctccccagtgcctctcctggccctggaagttgccactccagtgcccaccagccttgtcctaataaaattaagttgcatcattttgtctgactaggtgtccttctataatattatggggtggaggggggtggtatggagcaaggggcaagttgggaagacaacctgtagggcctgcggggtctattgggaaccaagctggagtgcagtggcacaatcttggctcactgcaatctccgcctcctgggttcaagcgattctcctgcctcagcctcccgagttgttgggattccaggcatgcatgaccaggctcagctaatttttgtttttttggtagagacggggtttcaccatattggccaggctggtctccaactcctaatctcaggtgatctacccaccttggcctcccaaattgctgggattacaggcgtgaaccactgctcccttccctgtccttatcgatgctacgtagataagtagcatggcgggttaatcattaactacagaggaacccctagtgatggagttggccactccctctctgcgcgctcgctcgctcactgaggccgggcgaccaaaggtcgcccgacgcccgggctttgcccgggcggcctcagtgagcgagcgagcgcgcagctgcctgcagg

SEQ ID NO: 4447 - DNA, 2289 bp, synthetic construct
  source 1..2289: mol_type = other DNA
cctgcaggcagctgcgcgctcgctcgctcactgaggccgcccgggcaaagcccgggcgtcgggcgacctttggtcgcccggcctcagtgagcgagcgagcgcgcagagagggagtggccaactccatcactaggggttccttgtagttaatgattaacccgccatgctacttatctacgtagccatgcgtcgacataacgcgtcgacattgattattgactagttattaatagtaatcaattacggggtcattagttcatagcccatatatggagttccgcgttacataacttacggtaaatggcccgcctggctgaccgcccaacgacccccgcccattgacgtcaataatgacgtatgttcccatagtaacgccaatagggactttccattgacgtcaatgggtggagtatttacggtaaactgcccacttggcagtacatcaagtgtatcatatgccaagtacgccccctattgacgtcaatgacggtaaatggcccgcctggcattatgcccagtacatgaccttatgggactttcctacttggcagtacatctacgtattagtcatcgctattaccatgtcgaggccacgttctgcttcactctccccatctcccccccctccccacccccaattttgtatttatttattttttaattattttgtgcagcgatgggggcggggggggggggcgcgcgccaggcggggcggggcggggcgaggggcggggcggggcgaggcggagaggtgcggcggcagccaatcagagcggcgcgctccgaaagtttccttttatggcgaggcggcggcggcggcggccctataaaaagcgaagcgcgcggcgggcgggagcaagcttcgtttagtgaaccgtcagatcgcctggagacgccatccacgctgttttgacctccatagaagacaccgggaccgatccagcctccgcggattcgaatcccggccgggaacggtgcattggaacgcggattccccgtgccaagagtgacgtaagtaccgcctatagagtctataggcccacaaaaaatgctttcttcttttaatatacttttttgtttatcttatttctaatactttccctaatctctttctttcagggcaataatgatacaatgtatcatgcctctttgcaccattctaaagaataacagtgataatttctgggttaaggcaatagcaatatttctgcatataaatatttctgcatataaattgtaactgatgtaagaggtttcatattgctaatagcagctacaatccagctaccattctgcttttattttatggttgggataaggctggattattctgagtccaagctaggcccttttgctaatcatgttcatacctcttatcttcctcccacagctcctgggcaacgtgctggtctgtgtgctggcccatcactttggcaaagaattgggattcgaaccggtgtgctgggcggggggcggcgggccctcccgcagaacaccatgcgctcttcggaagctcctcgcagttcggttgcctgtgacctggtaaccgaactgcgaggagcttctgaggagcgccttgacagcagccatgggagggccgccccctacctcagtgactcgaggggtggcatccctgtgacccctccccagtgcctctcctggccctggaagttgccactccagtgcccaccagccttgtcctaataaaattaagttgcatcattttgtctgactaggtgtccttctataatattatggggtggaggggggtggtatggagcaaggggcaagttgggaagacaacctgtagggcctgcggggtctattgggaaccaagctggagtgcagtggcacaatcttggctcactgcaatctccgcctcctgggttcaagcgattctcctgcctcagcctcccgagttgttgggattccaggcatgcatgaccaggctcagctaatttttgtttttttggtagagacggggtttcaccatattggccaggctggtctccaactcctaatctcaggtgatctacccaccttggcctcccaaattgctgggattacaggcgtgaaccactgctcccttccctgtccttatcgatgctacgtagataagtagcatggcgggttaatcattaactacagaggaacccctagtgatggagttggccactccctctctgcgcgctcgctcgctcactgaggccgggcgaccaaaggtcgcccgacgcccgggctttgcccgggcggcctcagtgagcgagcgagcgcgcagctgcctgcagg

SEQ ID NO: 4448 - DNA, 2289 bp, synthetic construct
  source 1..2289: mol_type = other DNA
cctgcaggcagctgcgcgctcgctcgctcactgaggccgcccgggcaaagcccgggcgtcgggcgacctttggtcgcccggcctcagtgagcgagcgagcgcgcagagagggagtggccaactccatcactaggggttccttgtagttaatgattaacccgccatgctacttatctacgtagccatgcgtcgacataacgcgtcgacattgattattgactagttattaatagtaatcaattacggggtcattagttcatagcccatatatggagttccgcgttacataacttacggtaaatggcccgcctggctgaccgcccaacgacccccgcccattgacgtcaataatgacgtatgttcccatagtaacgccaatagggactttccattgacgtcaatgggtggagtatttacggtaaactgcccacttggcagtacatcaagtgtatcatatgccaagtacgccccctattgacgtcaatgacggtaaatggcccgcctggcattatgcccagtacatgaccttatgggactttcctacttggcagtacatctacgtattagtcatcgctattaccatgtcgaggccacgttctgcttcactctccccatctcccccccctccccacccccaattttgtatttatttattttttaattattttgtgcagcgatgggggcggggggggggggcgcgcgccaggcggggcggggcggggcgaggggcggggcggggcgaggcggagaggtgcggcggcagccaatcagagcggcgcgctccgaaagtttccttttatggcgaggcggcggcggcggcggccctataaaaagcgaagcgcgcggcgggcgggagcaagcttcgtttagtgaaccgtcagatcgcctggagacgccatccacgctgttttgacctccatagaagacaccgggaccgatccagcctccgcggattcgaatcccggccgggaacggtgcattggaacgcggattccccgtgccaagagtgacgtaagtaccgcctatagagtctataggcccacaaaaaatgctttcttcttttaatatacttttttgtttatcttatttctaatactttccctaatctctttctttcagggcaataatgatacaatgtatcatgcctctttgcaccattctaaagaataacagtgataatttctgggttaaggcaatagcaatatttctgcatataaatatttctgcatataaattgtaactgatgtaagaggtttcatattgctaatagcagctacaatccagctaccattctgcttttattttatggttgggataaggctggattattctgagtccaagctaggcccttttgctaatcatgttcatacctcttatcttcctcccacagctcctgggcaacgtgctggtctgtgtgctggcccatcactttggcaaagaattgggattcgaaccggtgtgctgggcggggggcggcgggccctcccgcagaacaccatgcgctcttcggaaggctttggctcgggacttacctgtgacctggtaagtcccgagccaaagccttctgaggagcgccttgacagcagccatgggagggccgccccctacctcagtgactcgaggggtggcatccctgtgacccctccccagtgcctctcctggccctggaagttgccactccagtgcccaccagccttgtcctaataaaattaagttgcatcattttgtctgactaggtgtccttctataatattatggggtggaggggggtggtatggagcaaggggcaagttgggaagacaacctgtagggcctgcggggtctattgggaaccaagctggagtgcagtggcacaatcttggctcactgcaatctccgcctcctgggttcaagcgattctcctgcctcagcctcccgagttgttgggattccaggcatgcatgaccaggctcagctaatttttgtttttttggtagagacggggtttcaccatattggccaggctggtctccaactcctaatctcaggtgatctacccaccttggcctcccaaattgctgggattacaggcgtgaaccactgctcccttccctgtccttatcgatgctacgtagataagtagcatggcgggttaatcattaactacagaggaacccctagtgatggagttggccactccctctctgcgcgctcgctcgctcactgaggccgggcgaccaaaggtcgcccgacgcccgggctttgcccgggcggcctcagtgagcgagcgagcgcgcagctgcctgcagg

SEQ ID NO: 4449 - DNA, 2289 bp, synthetic construct
  source 1..2289: mol_type = other DNA
cctgcaggcagctgcgcgctcgctcgctcactgaggccgcccgggcaaagcccgggcgtcgggcgacctttggtcgcccggcctcagtgagcgagcgagcgcgcagagagggagtggccaactccatcactaggggttccttgtagttaatgattaacccgccatgctacttatctacgtagccatgcgtcgacataacgcgtcgacattgattattgactagttattaatagtaatcaattacggggtcattagttcatagcccatatatggagttccgcgttacataacttacggtaaatggcccgcctggctgaccgcccaacgacccccgcccattgacgtcaataatgacgtatgttcccatagtaacgccaatagggactttccattgacgtcaatgggtggagtatttacggtaaactgcccacttggcagtacatcaagtgtatcatatgccaagtacgccccctattgacgtcaatgacggtaaatggcccgcctggcattatgcccagtacatgaccttatgggactttcctacttggcagtacatctacgtattagtcatcgctattaccatgtcgaggccacgttctgcttcactctccccatctcccccccctccccacccccaattttgtatttatttattttttaattattttgtgcagcgatgggggcggggggggggggcgcgcgccaggcggggcggggcggggcgaggggcggggcggggcgaggcggagaggtgcggcggcagccaatcagagcggcgcgctccgaaagtttccttttatggcgaggcggcggcggcggcggccctataaaaagcgaagcgcgcggcgggcgggagcaagcttcgtttagtgaaccgtcagatcgcctggagacgccatccacgctgttttgacctccatagaagacaccgggaccgatccagcctccgcggattcgaatcccggccgggaacggtgcattggaacgcggattccccgtgccaagagtgacgtaagtaccgcctatagagtctataggcccacaaaaaatgctttcttcttttaatatacttttttgtttatcttatttctaatactttccctaatctctttctttcagggcaataatgatacaatgtatcatgcctctttgcaccattctaaagaataacagtgataatttctgggttaaggcaatagcaatatttctgcatataaatatttctgcatataaattgtaactgatgtaagaggtttcatattgctaatagcagctacaatccagctaccattctgcttttattttatggttgggataaggctggattattctgagtccaagctaggcccttttgctaatcatgttcatacctcttatcttcctcccacagctcctgggcaacgtgctggtctgtgtgctggcccatcactttggcaaagaattgggattcgaaccggtgtgctgggcggggggcggcgggccctcccgcagaacaccatgcgctcttcggaagactggaagcgatgacaatcctgtgatttggtttgtcatcgcttccagtcttctgaggagcgccttgacagcagccatgggagggccgccccctacctcagtgactcgaggggtggcatccctgtgacccctccccagtgcctctcctggccctggaagttgccactccagtgcccaccagccttgtcctaataaaattaagttgcatcattttgtctgactaggtgtccttctataatattatggggtggaggggggtggtatggagcaaggggcaagttgggaagacaacctgtagggcctgcggggtctattgggaaccaagctggagtgcagtggcacaatcttggctcactgcaatctccgcctcctgggttcaagcgattctcctgcctcagcctcccgagttgttgggattccaggcatgcatgaccaggctcagctaatttttgtttttttggtagagacggggtttcaccatattggccaggctggtctccaactcctaatctcaggtgatctacccaccttggcctcccaaattgctgggattacaggcgtgaaccactgctcccttccctgtccttatcgatgctacgtagataagtagcatggcgggttaatcattaactacagaggaacccctagtgatggagttggccactccctctctgcgcgctcgctcgctcactgaggccgggcgaccaaaggtcgcccgacgcccgggctttgcccgggcggcctcagtgagcgagcgagcgcgcagctgcctgcagg

SEQ ID NO: 4450 - DNA, 2289 bp, synthetic construct
  source 1..2289: mol_type = other DNA
cctgcaggcagctgcgcgctcgctcgctcactgaggccgcccgggcaaagcccgggcgtcgggcgacctttggtcgcccggcctcagtgagcgagcgagcgcgcagagagggagtggccaactccatcactaggggttccttgtagttaatgattaacccgccatgctacttatctacgtagccatgcgtcgacataacgcgtcgacattgattattgactagttattaatagtaatcaattacggggtcattagttcatagcccatatatggagttccgcgttacataacttacggtaaatggcccgcctggctgaccgcccaacgacccccgcccattgacgtcaataatgacgtatgttcccatagtaacgccaatagggactttccattgacgtcaatgggtggagtatttacggtaaactgcccacttggcagtacatcaagtgtatcatatgccaagtacgccccctattgacgtcaatgacggtaaatggcccgcctggcattatgcccagtacatgaccttatgggactttcctacttggcagtacatctacgtattagtcatcgctattaccatgtcgaggccacgttctgcttcactctccccatctcccccccctccccacccccaattttgtatttatttattttttaattattttgtgcagcgatgggggcggggggggggggcgcgcgccaggcggggcggggcggggcgaggggcggggcggggcgaggcggagaggtgcggcggcagccaatcagagcggcgcgctccgaaagtttccttttatggcgaggcggcggcggcggcggccctataaaaagcgaagcgcgcggcgggcgggagcaagcttcgtttagtgaaccgtcagatcgcctggagacgccatccacgctgttttgacctccatagaagacaccgggaccgatccagcctccgcggattcgaatcccggccgggaacggtgcattggaacgcggattccccgtgccaagagtgacgtaagtaccgcctatagagtctataggcccacaaaaaatgctttcttcttttaatatacttttttgtttatcttatttctaatactttccctaatctctttctttcagggcaataatgatacaatgtatcatgcctctttgcaccattctaaagaataacagtgataatttctgggttaaggcaatagcaatatttctgcatataaatatttctgcatataaattgtaactgatgtaagaggtttcatattgctaatagcagctacaatccagctaccattctgcttttattttatggttgggataaggctggattattctgagtccaagctaggcccttttgctaatcatgttcatacctcttatcttcctcccacagctcctgggcaacgtgctggtctgtgtgctggcccatcactttggcaaagaattgggattcgaaccggtgtgctgggcggggggcggcgggccctcccgcagaacaccatgcgctcttcggaacttccgcgagaacgccaatcctgtgatttggtttggcgttctcgcggaagttctgaggagcgccttgacagcagccatgggagggccgccccctacctcagtgactcgaggggtggcatccctgtgacccctccccagtgcctctcctggccctggaagttgccactccagtgcccaccagccttgtcctaataaaattaagttgcatcattttgtctgactaggtgtccttctataatattatggggtggaggggggtggtatggagcaaggggcaagttgggaagacaacctgtagggcctgcggggtctattgggaaccaagctggagtgcagtggcacaatcttggctcactgcaatctccgcctcctgggttcaagcgattctcctgcctcagcctcccgagttgttgggattccaggcatgcatgaccaggctcagctaatttttgtttttttggtagagacggggtttcaccatattggccaggctggtctccaactcctaatctcaggtgatctacccaccttggcctcccaaattgctgggattacaggcgtgaaccactgctcccttccctgtccttatcgatgctacgtagataagtagcatggcgggttaatcattaactacagaggaacccctagtgatggagttggccactccctctctgcgcgctcgctcgctcactgaggccgggcgaccaaaggtcgcccgacgcccgggctttgcccgggcggcctcagtgagcgagcgagcgcgcagctgcctgcagg

SEQ ID NO: 4451 - DNA, 2289 bp, synthetic construct
  source 1..2289: mol_type = other DNA
cctgcaggcagctgcgcgctcgctcgctcactgaggccgcccgggcaaagcccgggcgtcgggcgacctttggtcgcccggcctcagtgagcgagcgagcgcgcagagagggagtggccaactccatcactaggggttccttgtagttaatgattaacccgccatgctacttatctacgtagccatgcgtcgacataacgcgtcgacattgattattgactagttattaatagtaatcaattacggggtcattagttcatagcccatatatggagttccgcgttacataacttacggtaaatggcccgcctggctgaccgcccaacgacccccgcccattgacgtcaataatgacgtatgttcccatagtaacgccaatagggactttccattgacgtcaatgggtggagtatttacggtaaactgcccacttggcagtacatcaagtgtatcatatgccaagtacgccccctattgacgtcaatgacggtaaatggcccgcctggcattatgcccagtacatgaccttatgggactttcctacttggcagtacatctacgtattagtcatcgctattaccatgtcgaggccacgttctgcttcactctccccatctcccccccctccccacccccaattttgtatttatttattttttaattattttgtgcagcgatgggggcggggggggggggcgcgcgccaggcggggcggggcggggcgaggggcggggcggggcgaggcggagaggtgcggcggcagccaatcagagcggcgcgctccgaaagtttccttttatggcgaggcggcggcggcggcggccctataaaaagcgaagcgcgcggcgggcgggagcaagcttcgtttagtgaaccgtcagatcgcctggagacgccatccacgctgttttgacctccatagaagacaccgggaccgatccagcctccgcggattcgaatcccggccgggaacggtgcattggaacgcggattccccgtgccaagagtgacgtaagtaccgcctatagagtctataggcccacaaaaaatgctttcttcttttaatatacttttttgtttatcttatttctaatactttccctaatctctttctttcagggcaataatgatacaatgtatcatgcctctttgcaccattctaaagaataacagtgataatttctgggttaaggcaatagcaatatttctgcatataaatatttctgcatataaattgtaactgatgtaagaggtttcatattgctaatagcagctacaatccagctaccattctgcttttattttatggttgggataaggctggattattctgagtccaagctaggcccttttgctaatcatgttcatacctcttatcttcctcccacagctcctgggcaacgtgctggtctgtgtgctggcccatcactttggcaaagaattgggattcgaaccggtgtgctgggcggggggcggcgggccctcccgcagaacaccatgcgctcttcggaagcatcgacatggtagacttcctgtgatttggtagtctaccatgtcgatgcttctgaggagcgccttgacagcagccatgggagggccgccccctacctcagtgactcgaggggtggcatccctgtgacccctccccagtgcctctcctggccctggaagttgccactccagtgcccaccagccttgtcctaataaaattaagttgcatcattttgtctgactaggtgtccttctataatattatggggtggaggggggtggtatggagcaaggggcaagttgggaagacaacctgtagggcctgcggggtctattgggaaccaagctggagtgcagtggcacaatcttggctcactgcaatctccgcctcctgggttcaagcgattctcctgcctcagcctcccgagttgttgggattccaggcatgcatgaccaggctcagctaatttttgtttttttggtagagacggggtttcaccatattggccaggctggtctccaactcctaatctcaggtgatctacccaccttggcctcccaaattgctgggattacaggcgtgaaccactgctcccttccctgtccttatcgatgctacgtagataagtagcatggcgggttaatcattaactacagaggaacccctagtgatggagttggccactccctctctgcgcgctcgctcgctcactgaggccgggcgaccaaaggtcgcccgacgcccgggctttgcccgggcggcctcagtgagcgagcgagcgcgcagctgcctgcagg

SEQ ID NO: 4452 - DNA, 2289 bp, synthetic construct
  source 1..2289: mol_type = other DNA
cctgcaggcagctgcgcgctcgctcgctcactgaggccgcccgggcaaagcccgggcgtcgggcgacctttggtcgcccggcctcagtgagcgagcgagcgcgcagagagggagtggccaactccatcactaggggttccttgtagttaatgattaacccgccatgctacttatctacgtagccatgcgtcgacataacgcgtcgacattgattattgactagttattaatagtaatcaattacggggtcattagttcatagcccatatatggagttccgcgttacataacttacggtaaatggcccgcctggctgaccgcccaacgacccccgcccattgacgtcaataatgacgtatgttcccatagtaacgccaatagggactttccattgacgtcaatgggtggagtatttacggtaaactgcccacttggcagtacatcaagtgtatcatatgccaagtacgccccctattgacgtcaatgacggtaaatggcccgcctggcattatgcccagtacatgaccttatgggactttcctacttggcagtacatctacgtattagtcatcgctattaccatgtcgaggccacgttctgcttcactctccccatctcccccccctccccacccccaattttgtatttatttattttttaattattttgtgcagcgatgggggcggggggggggggcgcgcgccaggcggggcggggcggggcgaggggcggggcggggcgaggcggagaggtgcggcggcagccaatcagagcggcgcgctccgaaagtttccttttatggcgaggcggcggcggcggcggccctataaaaagcgaagcgcgcggcgggcgggagcaagcttcgtttagtgaaccgtcagatcgcctggagacgccatccacgctgttttgacctccatagaagacaccgggaccgatccagcctccgcggattcgaatcccggccgggaacggtgcattggaacgcggattccccgtgccaagagtgacgtaagtaccgcctatagagtctataggcccacaaaaaatgctttcttcttttaatatacttttttgtttatcttatttctaatactttccctaatctctttctttcagggcaataatgatacaatgtatcatgcctctttgcaccattctaaagaataacagtgataatttctgggttaaggcaatagcaatatttctgcatataaatatttctgcatataaattgtaactgatgtaagaggtttcatattgctaatagcagctacaatccagctaccattctgcttttattttatggttgggataaggctggattattctgagtccaagctaggcccttttgctaatcatgttcatacctcttatcttcctcccacagctcctgggcaacgtgctggtctgtgtgctggcccatcactttggcaaagaattgggattcgaaccggtgtgctgggcggggggcggcgggccctcccgcagaacaccatgcgctcttcggaagctcctcgcagttcggtttcctgtgatttggtaaccgaactgcgaggagcttctgaggagcgccttgacagcagccatgggagggccgccccctacctcagtgactcgaggggtggcatccctgtgacccctccccagtgcctctcctggccctggaagttgccactccagtgcccaccagccttgtcctaataaaattaagttgcatcattttgtctgactaggtgtccttctataatattatggggtggaggggggtggtatggagcaaggggcaagttgggaagacaacctgtagggcctgcggggtctattgggaaccaagctggagtgcagtggcacaatcttggctcactgcaatctccgcctcctgggttcaagcgattctcctgcctcagcctcccgagttgttgggattccaggcatgcatgaccaggctcagctaatttttgtttttttggtagagacggggtttcaccatattggccaggctggtctccaactcctaatctcaggtgatctacccaccttggcctcccaaattgctgggattacaggcgtgaaccactgctcccttccctgtccttatcgatgctacgtagataagtagcatggcgggttaatcattaactacagaggaacccctagtgatggagttggccactccctctctgcgcgctcgctcgctcactgaggccgggcgaccaaaggtcgcccgacgcccgggctttgcccgggcggcctcagtgagcgagcgagcgcgcagctgcctgcagg

SEQ ID NO: 4453 - DNA, 2289 bp, synthetic construct
  source 1..2289: mol_type = other DNA
cctgcaggcagctgcgcgctcgctcgctcactgaggccgcccgggcaaagcccgggcgtcgggcgacctttggtcgcccggcctcagtgagcgagcgagcgcgcagagagggagtggccaactccatcactaggggttccttgtagttaatgattaacccgccatgctacttatctacgtagccatgcgtcgacataacgcgtcgacattgattattgactagttattaatagtaatcaattacggggtcattagttcatagcccatatatggagttccgcgttacataacttacggtaaatggcccgcctggctgaccgcccaacgacccccgcccattgacgtcaataatgacgtatgttcccatagtaacgccaatagggactttccattgacgtcaatgggtggagtatttacggtaaactgcccacttggcagtacatcaagtgtatcatatgccaagtacgccccctattgacgtcaatgacggtaaatggcccgcctggcattatgcccagtacatgaccttatgggactttcctacttggcagtacatctacgtattagtcatcgctattaccatgtcgaggccacgttctgcttcactctccccatctcccccccctccccacccccaattttgtatttatttattttttaattattttgtgcagcgatgggggcggggggggggggcgcgcgccaggcggggcggggcggggcgaggggcggggcggggcgaggcggagaggtgcggcggcagccaatcagagcggcgcgctccgaaagtttccttttatggcgaggcggcggcggcggcggccctataaaaagcgaagcgcgcggcgggcgggagcaagcttcgtttagtgaaccgtcagatcgcctggagacgccatccacgctgttttgacctccatagaagacaccgggaccgatccagcctccgcggattcgaatcccggccgggaacggtgcattggaacgcggattccccgtgccaagagtgacgtaagtaccgcctatagagtctataggcccacaaaaaatgctttcttcttttaatatacttttttgtttatcttatttctaatactttccctaatctctttctttcagggcaataatgatacaatgtatcatgcctctttgcaccattctaaagaataacagtgataatttctgggttaaggcaatagcaatatttctgcatataaatatttctgcatataaattgtaactgatgtaagaggtttcatattgctaatagcagctacaatccagctaccattctgcttttattttatggttgggataaggctggattattctgagtccaagctaggcccttttgctaatcatgttcatacctcttatcttcctcccacagctcctgggcaacgtgctggtctgtgtgctggcccatcactttggcaaagaattgggattcgaaccggtgtgctgggcggggggcggcgggccctcccgcagaacaccatgcgctcttcggaaggctttggctcgggactttcctgtgatttggtaagtcccgagccaaagccttctgaggagcgccttgacagcagccatgggagggccgccccctacctcagtgactcgaggggtggcatccctgtgacccctccccagtgcctctcctggccctggaagttgccactccagtgcccaccagccttgtcctaataaaattaagttgcatcattttgtctgactaggtgtccttctataatattatggggtggaggggggtggtatggagcaaggggcaagttgggaagacaacctgtagggcctgcggggtctattgggaaccaagctggagtgcagtggcacaatcttggctcactgcaatctccgcctcctgggttcaagcgattctcctgcctcagcctcccgagttgttgggattccaggcatgcatgaccaggctcagctaatttttgtttttttggtagagacggggtttcaccatattggccaggctggtctccaactcctaatctcaggtgatctacccaccttggcctcccaaattgctgggattacaggcgtgaaccactgctcccttccctgtccttatcgatgctacgtagataagtagcatggcgggttaatcattaactacagaggaacccctagtgatggagttggccactccctctctgcgcgctcgctcgctcactgaggccgggcgaccaaaggtcgcccgacgcccgggctttgcccgggcggcctcagtgagcgagcgagcgcgcagctgcctgcagg

SEQ ID NO: 4454 - DNA, 2289 bp, synthetic construct
  source 1..2289: mol_type = other DNA
cctgcaggcagctgcgcgctcgctcgctcactgaggccgcccgggcaaagcccgggcgtcgggcgacctttggtcgcccggcctcagtgagcgagcgagcgcgcagagagggagtggccaactccatcactaggggttccttgtagttaatgattaacccgccatgctacttatctacgtagccatgcgtcgacataacgcgtcgacattgattattgactagttattaatagtaatcaattacggggtcattagttcatagcccatatatggagttccgcgttacataacttacggtaaatggcccgcctggctgaccgcccaacgacccccgcccattgacgtcaataatgacgtatgttcccatagtaacgccaatagggactttccattgacgtcaatgggtggagtatttacggtaaactgcccacttggcagtacatcaagtgtatcatatgccaagtacgccccctattgacgtcaatgacggtaaatggcccgcctggcattatgcccagtacatgaccttatgggactttcctacttggcagtacatctacgtattagtcatcgctattaccatgtcgaggccacgttctgcttcactctccccatctcccccccctccccacccccaattttgtatttatttattttttaattattttgtgcagcgatgggggcggggggggggggcgcgcgccaggcggggcggggcggggcgaggggcggggcggggcgaggcggagaggtgcggcggcagccaatcagagcggcgcgctccgaaagtttccttttatggcgaggcggcggcggcggcggccctataaaaagcgaagcgcgcggcgggcgggagcaagcttcgtttagtgaaccgtcagatcgcctggagacgccatccacgctgttttgacctccatagaagacaccgggaccgatccagcctccgcggattcgaatcccggccgggaacggtgcattggaacgcggattccccgtgccaagagtgacgtaagtaccgcctatagagtctataggcccacaaaaaatgctttcttcttttaatatacttttttgtttatcttatttctaatactttccctaatctctttctttcagggcaataatgatacaatgtatcatgcctctttgcaccattctaaagaataacagtgataatttctgggttaaggcaatagcaatatttctgcatataaatatttctgcatataaattgtaactgatgtaagaggtttcatattgctaatagcagctacaatccagctaccattctgcttttattttatggttgggataaggctggattattctgagtccaagctaggcccttttgctaatcatgttcatacctcttatcttcctcccacagctcctgggcaacgtgctggtctgtgtgctggcccatcactttggcaaagaattgggattcgaaccggtgtgctgggcggggggcggcgggccctcccgcagaacaccatgcgctcttcggaagactggaagggatgacaaccctgtgacctggtttgtcatcgcttccagtcttctgtggagcgccttgacagcagccatgggagggccgccccctacctcagtgactcgaggggtggcatccctgtgacccctccccagtgcctctcctggccctggaagttgccactccagtgcccaccagccttgtcctaataaaattaagttgcatcattttgtctgactaggtgtccttctataatattatggggtggaggggggtggtatggagcaaggggcaagttgggaagacaacctgtagggcctgcggggtctattgggaaccaagctggagtgcagtggcacaatcttggctcactgcaatctccgcctcctgggttcaagcgattctcctgcctcagcctcccgagttgttgggattccaggcatgcatgaccaggctcagctaatttttgtttttttggtagagacggggtttcaccatattggccaggctggtctccaactcctaatctcaggtgatctacccaccttggcctcccaaattgctgggattacaggcgtgaaccactgctcccttccctgtccttatcgatgctacgtagataagtagcatggcgggttaatcattaactacagaggaacccctagtgatggagttggccactccctctctgcgcgctcgctcgctcactgaggccgggcgaccaaaggtcgcccgacgcccgggctttgcccgggcggcctcagtgagcgagcgagcgcgcagctgcctgcagg

SEQ ID NO: 4455 - DNA, 2289 bp, synthetic construct
  source 1..2289: mol_type = other DNA
cctgcaggcagctgcgcgctcgctcgctcactgaggccgcccgggcaaagcccgggcgtcgggcgacctttggtcgcccggcctcagtgagcgagcgagcgcgcagagagggagtggccaactccatcactaggggttccttgtagttaatgattaacccgccatgctacttatctacgtagccatgcgtcgacataacgcgtcgacattgattattgactagttattaatagtaatcaattacggggtcattagttcatagcccatatatggagttccgcgttacataacttacggtaaatggcccgcctggctgaccgcccaacgacccccgcccattgacgtcaataatgacgtatgttcccatagtaacgccaatagggactttccattgacgtcaatgggtggagtatttacggtaaactgcccacttggcagtacatcaagtgtatcatatgccaagtacgccccctattgacgtcaatgacggtaaatggcccgcctggcattatgcccagtacatgaccttatgggactttcctacttggcagtacatctacgtattagtcatcgctattaccatgtcgaggccacgttctgcttcactctccccatctcccccccctccccacccccaattttgtatttatttattttttaattattttgtgcagcgatgggggcggggggggggggcgcgcgccaggcggggcggggcggggcgaggggcggggcggggcgaggcggagaggtgcggcggcagccaatcagagcggcgcgctccgaaagtttccttttatggcgaggcggcggcggcggcggccctataaaaagcgaagcgcgcggcgggcgggagcaagcttcgtttagtgaaccgtcagatcgcctggagacgccatccacgctgttttgacctccatagaagacaccgggaccgatccagcctccgcggattcgaatcccggccgggaacggtgcattggaacgcggattccccgtgccaagagtgacgtaagtaccgcctatagagtctataggcccacaaaaaatgctttcttcttttaatatacttttttgtttatcttatttctaatactttccctaatctctttctttcagggcaataatgatacaatgtatcatgcctctttgcaccattctaaagaataacagtgataatttctgggttaaggcaatagcaatatttctgcatataaatatttctgcatataaattgtaactgatgtaagaggtttcatattgctaatagcagctacaatccagctaccattctgcttttattttatggttgggataaggctggattattctgagtccaagctaggcccttttgctaatcatgttcatacctcttatcttcctcccacagctcctgggcaacgtgctggtctgtgtgctggcccatcactttggcaaagaattgggattcgaaccggtgtgctgggcggggggcggcgggccctcccgcagaacaccatgcgctcttcggaacttccgcgacaacgccaaccctgtgacctggtttggcgttctcgcggaagttctgtggagcgccttgacagcagccatgggagggccgccccctacctcagtgactcgaggggtggcatccctgtgacccctccccagtgcctctcctggccctggaagttgccactccagtgcccaccagccttgtcctaataaaattaagttgcatcattttgtctgactaggtgtccttctataatattatggggtggaggggggtggtatggagcaaggggcaagttgggaagacaacctgtagggcctgcggggtctattgggaaccaagctggagtgcagtggcacaatcttggctcactgcaatctccgcctcctgggttcaagcgattctcctgcctcagcctcccgagttgttgggattccaggcatgcatgaccaggctcagctaatttttgtttttttggtagagacggggtttcaccatattggccaggctggtctccaactcctaatctcaggtgatctacccaccttggcctcccaaattgctgggattacaggcgtgaaccactgctcccttccctgtccttatcgatgctacgtagataagtagcatggcgggttaatcattaactacagaggaacccctagtgatggagttggccactccctctctgcgcgctcgctcgctcactgaggccgggcgaccaaaggtcgcccgacgcccgggctttgcccgggcggcctcagtgagcgagcgagcgcgcagctgcctgcagg

SEQ ID NO: 4456 - DNA, 2289 bp, synthetic construct
  source 1..2289: mol_type = other DNA
cctgcaggcagctgcgcgctcgctcgctcactgaggccgcccgggcaaagcccgggcgtcgggcgacctttggtcgcccggcctcagtgagcgagcgagcgcgcagagagggagtggccaactccatcactaggggttccttgtagttaatgattaacccgccatgctacttatctacgtagccatgcgtcgacataacgcgtcgacattgattattgactagttattaatagtaatcaattacggggtcattagttcatagcccatatatggagttccgcgttacataacttacggtaaatggcccgcctggctgaccgcccaacgacccccgcccattgacgtcaataatgacgtatgttcccatagtaacgccaatagggactttccattgacgtcaatgggtggagtatttacggtaaactgcccacttggcagtacatcaagtgtatcatatgccaagtacgccccctattgacgtcaatgacggtaaatggcccgcctggcattatgcccagtacatgaccttatgggactttcctacttggcagtacatctacgtattagtcatcgctattaccatgtcgaggccacgttctgcttcactctccccatctcccccccctccccacccccaattttgtatttatttattttttaattattttgtgcagcgatgggggcggggggggggggcgcgcgccaggcggggcggggcggggcgaggggcggggcggggcgaggcggagaggtgcggcggcagccaatcagagcggcgcgctccgaaagtttccttttatggcgaggcggcggcggcggcggccctataaaaagcgaagcgcgcggcgggcgggagcaagcttcgtttagtgaaccgtcagatcgcctggagacgccatccacgctgttttgacctccatagaagacaccgggaccgatccagcctccgcggattcgaatcccggccgggaacggtgcattggaacgcggattccccgtgccaagagtgacgtaagtaccgcctatagagtctataggcccacaaaaaatgctttcttcttttaatatacttttttgtttatcttatttctaatactttccctaatctctttctttcagggcaataatgatacaatgtatcatgcctctttgcaccattctaaagaataacagtgataatttctgggttaaggcaatagcaatatttctgcatataaatatttctgcatataaattgtaactgatgtaagaggtttcatattgctaatagcagctacaatccagctaccattctgcttttattttatggttgggataaggctggattattctgagtccaagctaggcccttttgctaatcatgttcatacctcttatcttcctcccacagctcctgggcaacgtgctggtctgtgtgctggcccatcactttggcaaagaattgggattcgaaccggtgtgctgggcggggggcggcgggccctcccgcagaacaccatgcgctcttcggaagcatcgacaaggtagactccctgtgacctggtagtctaccatgtcgatgcttctgtggagcgccttgacagcagccatgggagggccgccccctacctcagtgactcgaggggtggcatccctgtgacccctccccagtgcctctcctggccctggaagttgccactccagtgcccaccagccttgtcctaataaaattaagttgcatcattttgtctgactaggtgtccttctataatattatggggtggaggggggtggtatggagcaaggggcaagttgggaagacaacctgtagggcctgcggggtctattgggaaccaagctggagtgcagtggcacaatcttggctcactgcaatctccgcctcctgggttcaagcgattctcctgcctcagcctcccgagttgttgggattccaggcatgcatgaccaggctcagctaatttttgtttttttggtagagacggggtttcaccatattggccaggctggtctccaactcctaatctcaggtgatctacccaccttggcctcccaaattgctgggattacaggcgtgaaccactgctcccttccctgtccttatcgatgctacgtagataagtagcatggcgggttaatcattaactacagaggaacccctagtgatggagttggccactccctctctgcgcgctcgctcgctcactgaggccgggcgaccaaaggtcgcccgacgcccgggctttgcccgggcggcctcagtgagcgagcgagcgcgcagctgcctgcagg

SEQ ID NO: 4457 - DNA, 2289 bp, synthetic construct
  source 1..2289: mol_type = other DNA
cctgcaggcagctgcgcgctcgctcgctcactgaggccgcccgggcaaagcccgggcgtcgggcgacctttggtcgcccggcctcagtgagcgagcgagcgcgcagagagggagtggccaactccatcactaggggttccttgtagttaatgattaacccgccatgctacttatctacgtagccatgcgtcgacataacgcgtcgacattgattattgactagttattaatagtaatcaattacggggtcattagttcatagcccatatatggagttccgcgttacataacttacggtaaatggcccgcctggctgaccgcccaacgacccccgcccattgacgtcaataatgacgtatgttcccatagtaacgccaatagggactttccattgacgtcaatgggtggagtatttacggtaaactgcccacttggcagtacatcaagtgtatcatatgccaagtacgccccctattgacgtcaatgacggtaaatggcccgcctggcattatgcccagtacatgaccttatgggactttcctacttggcagtacatctacgtattagtcatcgctattaccatgtcgaggccacgttctgcttcactctccccatctcccccccctccccacccccaattttgtatttatttattttttaattattttgtgcagcgatgggggcggggggggggggcgcgcgccaggcggggcggggcggggcgaggggcggggcggggcgaggcggagaggtgcggcggcagccaatcagagcggcgcgctccgaaagtttccttttatggcgaggcggcggcggcggcggccctataaaaagcgaagcgcgcggcgggcgggagcaagcttcgtttagtgaaccgtcagatcgcctggagacgccatccacgctgttttgacctccatagaagacaccgggaccgatccagcctccgcggattcgaatcccggccgggaacggtgcattggaacgcggattccccgtgccaagagtgacgtaagtaccgcctatagagtctataggcccacaaaaaatgctttcttcttttaatatacttttttgtttatcttatttctaatactttccctaatctctttctttcagggcaataatgatacaatgtatcatgcctctttgcaccattctaaagaataacagtgataatttctgggttaaggcaatagcaatatttctgcatataaatatttctgcatataaattgtaactgatgtaagaggtttcatattgctaatagcagctacaatccagctaccattctgcttttattttatggttgggataaggctggattattctgagtccaagctaggcccttttgctaatcatgttcatacctcttatcttcctcccacagctcctgggcaacgtgctggtctgtgtgctggcccatcactttggcaaagaattgggattcgaaccggtgtgctgggcggggggcggcgggccctcccgcagaacaccatgcgctcttcggaagctcctcgctgttcggttccctgtgacctggtaaccgaactgcgaggagcttctgtggagcgccttgacagcagccatgggagggccgccccctacctcagtgactcgaggggtggcatccctgtgacccctccccagtgcctctcctggccctggaagttgccactccagtgcccaccagccttgtcctaataaaattaagttgcatcattttgtctgactaggtgtccttctataatattatggggtggaggggggtggtatggagcaaggggcaagttgggaagacaacctgtagggcctgcggggtctattgggaaccaagctggagtgcagtggcacaatcttggctcactgcaatctccgcctcctgggttcaagcgattctcctgcctcagcctcccgagttgttgggattccaggcatgcatgaccaggctcagctaatttttgtttttttggtagagacggggtttcaccatattggccaggctggtctccaactcctaatctcaggtgatctacccaccttggcctcccaaattgctgggattacaggcgtgaaccactgctcccttccctgtccttatcgatgctacgtagataagtagcatggcgggttaatcattaactacagaggaacccctagtgatggagttggccactccctctctgcgcgctcgctcgctcactgaggccgggcgaccaaaggtcgcccgacgcccgggctttgcccgggcggcctcagtgagcgagcgagcgcgcagctgcctgcagg

SEQ ID NO: 4458 - DNA, 2289 bp, synthetic construct
  source 1..2289: mol_type = other DNA
cctgcaggcagctgcgcgctcgctcgctcactgaggccgcccgggcaaagcccgggcgtcgggcgacctttggtcgcccggcctcagtgagcgagcgagcgcgcagagagggagtggccaactccatcactaggggttccttgtagttaatgattaacccgccatgctacttatctacgtagccatgcgtcgacataacgcgtcgacattgattattgactagttattaatagtaatcaattacggggtcattagttcatagcccatatatggagttccgcgttacataacttacggtaaatggcccgcctggctgaccgcccaacgacccccgcccattgacgtcaataatgacgtatgttcccatagtaacgccaatagggactttccattgacgtcaatgggtggagtatttacggtaaactgcccacttggcagtacatcaagtgtatcatatgccaagtacgccccctattgacgtcaatgacggtaaatggcccgcctggcattatgcccagtacatgaccttatgggactttcctacttggcagtacatctacgtattagtcatcgctattaccatgtcgaggccacgttctgcttcactctccccatctcccccccctccccacccccaattttgtatttatttattttttaattattttgtgcagcgatgggggcggggggggggggcgcgcgccaggcggggcggggcggggcgaggggcggggcggggcgaggcggagaggtgcggcggcagccaatcagagcggcgcgctccgaaagtttccttttatggcgaggcggcggcggcggcggccctataaaaagcgaagcgcgcggcgggcgggagcaagcttcgtttagtgaaccgtcagatcgcctggagacgccatccacgctgttttgacctccatagaagacaccgggaccgatccagcctccgcggattcgaatcccggccgggaacggtgcattggaacgcggattccccgtgccaagagtgacgtaagtaccgcctatagagtctataggcccacaaaaaatgctttcttcttttaatatacttttttgtttatcttatttctaatactttccctaatctctttctttcagggcaataatgatacaatgtatcatgcctctttgcaccattctaaagaataacagtgataatttctgggttaaggcaatagcaatatttctgcatataaatatttctgcatataaattgtaactgatgtaagaggtttcatattgctaatagcagctacaatccagctaccattctgcttttattttatggttgggataaggctggattattctgagtccaagctaggcccttttgctaatcatgttcatacctcttatcttcctcccacagctcctgggcaacgtgctggtctgtgtgctggcccatcactttggcaaagaattgggattcgaaccggtgtgctgggcggggggcggcgggccctcccgcagaacaccatgcgctcttcggaaggctttggcacgggacttccctgtgacctggtaagtcccgagccaaagccttctgtggagcgccttgacagcagccatgggagggccgccccctacctcagtgactcgaggggtggcatccctgtgacccctccccagtgcctctcctggccctggaagttgccactccagtgcccaccagccttgtcctaataaaattaagttgcatcattttgtctgactaggtgtccttctataatattatggggtggaggggggtggtatggagcaaggggcaagttgggaagacaacctgtagggcctgcggggtctattgggaaccaagctggagtgcagtggcacaatcttggctcactgcaatctccgcctcctgggttcaagcgattctcctgcctcagcctcccgagttgttgggattccaggcatgcatgaccaggctcagctaatttttgtttttttggtagagacggggtttcaccatattggccaggctggtctccaactcctaatctcaggtgatctacccaccttggcctcccaaattgctgggattacaggcgtgaaccactgctcccttccctgtccttatcgatgctacgtagataagtagcatggcgggttaatcattaactacagaggaacccctagtgatggagttggccactccctctctgcgcgctcgctcgctcactgaggccgggcgaccaaaggtcgcccgacgcccgggctttgcccgggcggcctcagtgagcgagcgagcgcgcagctgcctgcagg

SEQ ID NO: 4459 - DNA, 2289 bp, synthetic construct
  source 1..2289: mol_type = other DNA
cctgcaggcagctgcgcgctcgctcgctcactgaggccgcccgggcaaagcccgggcgtcgggcgacctttggtcgcccggcctcagtgagcgagcgagcgcgcagagagggagtggccaactccatcactaggggttccttgtagttaatgattaacccgccatgctacttatctacgtagccatgcgtcgacataacgcgtcgacattgattattgactagttattaatagtaatcaattacggggtcattagttcatagcccatatatggagttccgcgttacataacttacggtaaatggcccgcctggctgaccgcccaacgacccccgcccattgacgtcaataatgacgtatgttcccatagtaacgccaatagggactttccattgacgtcaatgggtggagtatttacggtaaactgcccacttggcagtacatcaagtgtatcatatgccaagtacgccccctattgacgtcaatgacggtaaatggcccgcctggcattatgcccagtacatgaccttatgggactttcctacttggcagtacatctacgtattagtcatcgctattaccatgtcgaggccacgttctgcttcactctccccatctcccccccctccccacccccaattttgtatttatttattttttaattattttgtgcagcgatgggggcggggggggggggcgcgcgccaggcggggcggggcggggcgaggggcggggcggggcgaggcggagaggtgcggcggcagccaatcagagcggcgcgctccgaaagtttccttttatggcgaggcggcggcggcggcggccctataaaaagcgaagcgcgcggcgggcgggagcaagcttcgtttagtgaaccgtcagatcgcctggagacgccatccacgctgttttgacctccatagaagacaccgggaccgatccagcctccgcggattcgaatcccggccgggaacggtgcattggaacgcggattccccgtgccaagagtgacgtaagtaccgcctatagagtctataggcccacaaaaaatgctttcttcttttaatatacttttttgtttatcttatttctaatactttccctaatctctttctttcagggcaataatgatacaatgtatcatgcctctttgcaccattctaaagaataacagtgataatttctgggttaaggcaatagcaatatttctgcatataaatatttctgcatataaattgtaactgatgtaagaggtttcatattgctaatagcagctacaatccagctaccattctgcttttattttatggttgggataaggctggattattctgagtccaagctaggcccttttgctaatcatgttcatacctcttatcttcctcccacagctcctgggcaacgtgctggtctgtgtgctggcccatcactttggcaaagaattgggattcgaaccggtgtgctgggcggggggcggcgggccctcccgcagaacaccatgcgctcttcggaagactggaagcgatgacaagcctgtgacctggtttgtcatcgcttccagtcttctgtggagcgccttgacagcagccatgggagggccgccccctacctcagtgactcgaggggtggcatccctgtgacccctccccagtgcctctcctggccctggaagttgccactccagtgcccaccagccttgtcctaataaaattaagttgcatcattttgtctgactaggtgtccttctataatattatggggtggaggggggtggtatggagcaaggggcaagttgggaagacaacctgtagggcctgcggggtctattgggaaccaagctggagtgcagtggcacaatcttggctcactgcaatctccgcctcctgggttcaagcgattctcctgcctcagcctcccgagttgttgggattccaggcatgcatgaccaggctcagctaatttttgtttttttggtagagacggggtttcaccatattggccaggctggtctccaactcctaatctcaggtgatctacccaccttggcctcccaaattgctgggattacaggcgtgaaccactgctcccttccctgtccttatcgatgctacgtagataagtagcatggcgggttaatcattaactacagaggaacccctagtgatggagttggccactccctctctgcgcgctcgctcgctcactgaggccgggcgaccaaaggtcgcccgacgcccgggctttgcccgggcggcctcagtgagcgagcgagcgcgcagctgcctgcagg

SEQ ID NO: 4460 - DNA, 2289 bp, synthetic construct
  source 1..2289: mol_type = other DNA
cctgcaggcagctgcgcgctcgctcgctcactgaggccgcccgggcaaagcccgggcgtcgggcgacctttggtcgcccggcctcagtgagcgagcgagcgcgcagagagggagtggccaactccatcactaggggttccttgtagttaatgattaacccgccatgctacttatctacgtagccatgcgtcgacataacgcgtcgacattgattattgactagttattaatagtaatcaattacggggtcattagttcatagcccatatatggagttccgcgttacataacttacggtaaatggcccgcctggctgaccgcccaacgacccccgcccattgacgtcaataatgacgtatgttcccatagtaacgccaatagggactttccattgacgtcaatgggtggagtatttacggtaaactgcccacttggcagtacatcaagtgtatcatatgccaagtacgccccctattgacgtcaatgacggtaaatggcccgcctggcattatgcccagtacatgaccttatgggactttcctacttggcagtacatctacgtattagtcatcgctattaccatgtcgaggccacgttctgcttcactctccccatctcccccccctccccacccccaattttgtatttatttattttttaattattttgtgcagcgatgggggcggggggggggggcgcgcgccaggcggggcggggcggggcgaggggcggggcggggcgaggcggagaggtgcggcggcagccaatcagagcggcgcgctccgaaagtttccttttatggcgaggcggcggcggcggcggccctataaaaagcgaagcgcgcggcgggcgggagcaagcttcgtttagtgaaccgtcagatcgcctggagacgccatccacgctgttttgacctccatagaagacaccgggaccgatccagcctccgcggattcgaatcccggccgggaacggtgcattggaacgcggattccccgtgccaagagtgacgtaagtaccgcctatagagtctataggcccacaaaaaatgctttcttcttttaatatacttttttgtttatcttatttctaatactttccctaatctctttctttcagggcaataatgatacaatgtatcatgcctctttgcaccattctaaagaataacagtgataatttctgggttaaggcaatagcaatatttctgcatataaatatttctgcatataaattgtaactgatgtaagaggtttcatattgctaatagcagctacaatccagctaccattctgcttttattttatggttgggataaggctggattattctgagtccaagctaggcccttttgctaatcatgttcatacctcttatcttcctcccacagctcctgggcaacgtgctggtctgtgtgctggcccatcactttggcaaagaattgggattcgaaccggtgtgctgggcggggggcggcgggccctcccgcagaacaccatgcgctcttcggaacttccgcgagaacgccaagcctgtgacctggtttggcgttctcgcggaagttctgtggagcgccttgacagcagccatgggagggccgccccctacctcagtgactcgaggggtggcatccctgtgacccctccccagtgcctctcctggccctggaagttgccactccagtgcccaccagccttgtcctaataaaattaagttgcatcattttgtctgactaggtgtccttctataatattatggggtggaggggggtggtatggagcaaggggcaagttgggaagacaacctgtagggcctgcggggtctattgggaaccaagctggagtgcagtggcacaatcttggctcactgcaatctccgcctcctgggttcaagcgattctcctgcctcagcctcccgagttgttgggattccaggcatgcatgaccaggctcagctaatttttgtttttttggtagagacggggtttcaccatattggccaggctggtctccaactcctaatctcaggtgatctacccaccttggcctcccaaattgctgggattacaggcgtgaaccactgctcccttccctgtccttatcgatgctacgtagataagtagcatggcgggttaatcattaactacagaggaacccctagtgatggagttggccactccctctctgcgcgctcgctcgctcactgaggccgggcgaccaaaggtcgcccgacgcccgggctttgcccgggcggcctcagtgagcgagcgagcgcgcagctgcctgcagg

SEQ ID NO: 4461 - DNA, 2289 bp, synthetic construct
  source 1..2289: mol_type = other DNA
cctgcaggcagctgcgcgctcgctcgctcactgaggccgcccgggcaaagcccgggcgtcgggcgacctttggtcgcccggcctcagtgagcgagcgagcgcgcagagagggagtggccaactccatcactaggggttccttgtagttaatgattaacccgccatgctacttatctacgtagccatgcgtcgacataacgcgtcgacattgattattgactagttattaatagtaatcaattacggggtcattagttcatagcccatatatggagttccgcgttacataacttacggtaaatggcccgcctggctgaccgcccaacgacccccgcccattgacgtcaataatgacgtatgttcccatagtaacgccaatagggactttccattgacgtcaatgggtggagtatttacggtaaactgcccacttggcagtacatcaagtgtatcatatgccaagtacgccccctattgacgtcaatgacggtaaatggcccgcctggcattatgcccagtacatgaccttatgggactttcctacttggcagtacatctacgtattagtcatcgctattaccatgtcgaggccacgttctgcttcactctccccatctcccccccctccccacccccaattttgtatttatttattttttaattattttgtgcagcgatgggggcggggggggggggcgcgcgccaggcggggcggggcggggcgaggggcggggcggggcgaggcggagaggtgcggcggcagccaatcagagcggcgcgctccgaaagtttccttttatggcgaggcggcggcggcggcggccctataaaaagcgaagcgcgcggcgggcgggagcaagcttcgtttagtgaaccgtcagatcgcctggagacgccatccacgctgttttgacctccatagaagacaccgggaccgatccagcctccgcggattcgaatcccggccgggaacggtgcattggaacgcggattccccgtgccaagagtgacgtaagtaccgcctatagagtctataggcccacaaaaaatgctttcttcttttaatatacttttttgtttatcttatttctaatactttccctaatctctttctttcagggcaataatgatacaatgtatcatgcctctttgcaccattctaaagaataacagtgataatttctgggttaaggcaatagcaatatttctgcatataaatatttctgcatataaattgtaactgatgtaagaggtttcatattgctaatagcagctacaatccagctaccattctgcttttattttatggttgggataaggctggattattctgagtccaagctaggcccttttgctaatcatgttcatacctcttatcttcctcccacagctcctgggcaacgtgctggtctgtgtgctggcccatcactttggcaaagaattgggattcgaaccggtgtgctgggcggggggcggcgggccctcccgcagaacaccatgcgctcttcggaagcatcgacatggtagactgcctgtgacctggtagtctaccatgtcgatgcttctgtggagcgccttgacagcagccatgggagggccgccccctacctcagtgactcgaggggtggcatccctgtgacccctccccagtgcctctcctggccctggaagttgccactccagtgcccaccagccttgtcctaataaaattaagttgcatcattttgtctgactaggtgtccttctataatattatggggtggaggggggtggtatggagcaaggggcaagttgggaagacaacctgtagggcctgcggggtctattgggaaccaagctggagtgcagtggcacaatcttggctcactgcaatctccgcctcctgggttcaagcgattctcctgcctcagcctcccgagttgttgggattccaggcatgcatgaccaggctcagctaatttttgtttttttggtagagacggggtttcaccatattggccaggctggtctccaactcctaatctcaggtgatctacccaccttggcctcccaaattgctgggattacaggcgtgaaccactgctcccttccctgtccttatcgatgctacgtagataagtagcatggcgggttaatcattaactacagaggaacccctagtgatggagttggccactccctctctgcgcgctcgctcgctcactgaggccgggcgaccaaaggtcgcccgacgcccgggctttgcccgggcggcctcagtgagcgagcgagcgcgcagctgcctgcagg

SEQ ID NO: 4462 - DNA, 2289 bp, synthetic construct
  source 1..2289: mol_type = other DNA
cctgcaggcagctgcgcgctcgctcgctcactgaggccgcccgggcaaagcccgggcgtcgggcgacctttggtcgcccggcctcagtgagcgagcgagcgcgcagagagggagtggccaactccatcactaggggttccttgtagttaatgattaacccgccatgctacttatctacgtagccatgcgtcgacataacgcgtcgacattgattattgactagttattaatagtaatcaattacggggtcattagttcatagcccatatatggagttccgcgttacataacttacggtaaatggcccgcctggctgaccgcccaacgacccccgcccattgacgtcaataatgacgtatgttcccatagtaacgccaatagggactttccattgacgtcaatgggtggagtatttacggtaaactgcccacttggcagtacatcaagtgtatcatatgccaagtacgccccctattgacgtcaatgacggtaaatggcccgcctggcattatgcccagtacatgaccttatgggactttcctacttggcagtacatctacgtattagtcatcgctattaccatgtcgaggccacgttctgcttcactctccccatctcccccccctccccacccccaattttgtatttatttattttttaattattttgtgcagcgatgggggcggggggggggggcgcgcgccaggcggggcggggcggggcgaggggcggggcggggcgaggcggagaggtgcggcggcagccaatcagagcggcgcgctccgaaagtttccttttatggcgaggcggcggcggcggcggccctataaaaagcgaagcgcgcggcgggcgggagcaagcttcgtttagtgaaccgtcagatcgcctggagacgccatccacgctgttttgacctccatagaagacaccgggaccgatccagcctccgcggattcgaatcccggccgggaacggtgcattggaacgcggattccccgtgccaagagtgacgtaagtaccgcctatagagtctataggcccacaaaaaatgctttcttcttttaatatacttttttgtttatcttatttctaatactttccctaatctctttctttcagggcaataatgatacaatgtatcatgcctctttgcaccattctaaagaataacagtgataatttctgggttaaggcaatagcaatatttctgcatataaatatttctgcatataaattgtaactgatgtaagaggtttcatattgctaatagcagctacaatccagctaccattctgcttttattttatggttgggataaggctggattattctgagtccaagctaggcccttttgctaatcatgttcatacctcttatcttcctcccacagctcctgggcaacgtgctggtctgtgtgctggcccatcactttggcaaagaattgggattcgaaccggtgtgctgggcggggggcggcgggccctcccgcagaacaccatgcgctcttcggaagctcctcgcagttcggttgcctgtgacctggtaaccgaactgcgaggagcttctgtggagcgccttgacagcagccatgggagggccgccccctacctcagtgactcgaggggtggcatccctgtgacccctccccagtgcctctcctggccctggaagttgccactccagtgcccaccagccttgtcctaataaaattaagttgcatcattttgtctgactaggtgtccttctataatattatggggtggaggggggtggtatggagcaaggggcaagttgggaagacaacctgtagggcctgcggggtctattgggaaccaagctggagtgcagtggcacaatcttggctcactgcaatctccgcctcctgggttcaagcgattctcctgcctcagcctcccgagttgttgggattccaggcatgcatgaccaggctcagctaatttttgtttttttggtagagacggggtttcaccatattggccaggctggtctccaactcctaatctcaggtgatctacccaccttggcctcccaaattgctgggattacaggcgtgaaccactgctcccttccctgtccttatcgatgctacgtagataagtagcatggcgggttaatcattaactacagaggaacccctagtgatggagttggccactccctctctgcgcgctcgctcgctcactgaggccgggcgaccaaaggtcgcccgacgcccgggctttgcccgggcggcctcagtgagcgagcgagcgcgcagctgcctgcagg

SEQ ID NO: 4463 - DNA, 2289 bp, synthetic construct
  source 1..2289: mol_type = other DNA
cctgcaggcagctgcgcgctcgctcgctcactgaggccgcccgggcaaagcccgggcgtcgggcgacctttggtcgcccggcctcagtgagcgagcgagcgcgcagagagggagtggccaactccatcactaggggttccttgtagttaatgattaacccgccatgctacttatctacgtagccatgcgtcgacataacgcgtcgacattgattattgactagttattaatagtaatcaattacggggtcattagttcatagcccatatatggagttccgcgttacataacttacggtaaatggcccgcctggctgaccgcccaacgacccccgcccattgacgtcaataatgacgtatgttcccatagtaacgccaatagggactttccattgacgtcaatgggtggagtatttacggtaaactgcccacttggcagtacatcaagtgtatcatatgccaagtacgccccctattgacgtcaatgacggtaaatggcccgcctggcattatgcccagtacatgaccttatgggactttcctacttggcagtacatctacgtattagtcatcgctattaccatgtcgaggccacgttctgcttcactctccccatctcccccccctccccacccccaattttgtatttatttattttttaattattttgtgcagcgatgggggcggggggggggggcgcgcgccaggcggggcggggcggggcgaggggcggggcggggcgaggcggagaggtgcggcggcagccaatcagagcggcgcgctccgaaagtttccttttatggcgaggcggcggcggcggcggccctataaaaagcgaagcgcgcggcgggcgggagcaagcttcgtttagtgaaccgtcagatcgcctggagacgccatccacgctgttttgacctccatagaagacaccgggaccgatccagcctccgcggattcgaatcccggccgggaacggtgcattggaacgcggattccccgtgccaagagtgacgtaagtaccgcctatagagtctataggcccacaaaaaatgctttcttcttttaatatacttttttgtttatcttatttctaatactttccctaatctctttctttcagggcaataatgatacaatgtatcatgcctctttgcaccattctaaagaataacagtgataatttctgggttaaggcaatagcaatatttctgcatataaatatttctgcatataaattgtaactgatgtaagaggtttcatattgctaatagcagctacaatccagctaccattctgcttttattttatggttgggataaggctggattattctgagtccaagctaggcccttttgctaatcatgttcatacctcttatcttcctcccacagctcctgggcaacgtgctggtctgtgtgctggcccatcactttggcaaagaattgggattcgaaccggtgtgctgggcggggggcggcgggccctcccgcagaacaccatgcgctcttcggaaggctttggctcgggacttgcctgtgacctggtaagtcccgagccaaagccttctgtggagcgccttgacagcagccatgggagggccgccccctacctcagtgactcgaggggtggcatccctgtgacccctccccagtgcctctcctggccctggaagttgccactccagtgcccaccagccttgtcctaataaaattaagttgcatcattttgtctgactaggtgtccttctataatattatggggtggaggggggtggtatggagcaaggggcaagttgggaagacaacctgtagggcctgcggggtctattgggaaccaagctggagtgcagtggcacaatcttggctcactgcaatctccgcctcctgggttcaagcgattctcctgcctcagcctcccgagttgttgggattccaggcatgcatgaccaggctcagctaatttttgtttttttggtagagacggggtttcaccatattggccaggctggtctccaactcctaatctcaggtgatctacccaccttggcctcccaaattgctgggattacaggcgtgaaccactgctcccttccctgtccttatcgatgctacgtagataagtagcatggcgggttaatcattaactacagaggaacccctagtgatggagttggccactccctctctgcgcgctcgctcgctcactgaggccgggcgaccaaaggtcgcccgacgcccgggctttgcccgggcggcctcagtgagcgagcgagcgcgcagctgcctgcagg

SEQ ID NO: 4464 - DNA, 2391 bp, synthetic construct
  source 1..2391: mol_type = other DNA
cctgcaggcagctgcgcgctcgctcgctcactgaggccgcccgggcaaagcccgggcgtcgggcgacctttggtcgcccggcctcagtgagcgagcgagcgcgcagagagggagtggccaactccatcactaggggttccttgtagttaatgattaacccgccatgctacttatctacgtagccatgcgtcgacataacgcgtcgacattgattattgactagttattaatagtaatcaattacggggtcattagttcatagcccatatatggagttccgcgttacataacttacggtaaatggcccgcctggctgaccgcccaacgacccccgcccattgacgtcaataatgacgtatgttcccatagtaacgccaatagggactttccattgacgtcaatgggtggagtatttacggtaaactgcccacttggcagtacatcaagtgtatcatatgccaagtacgccccctattgacgtcaatgacggtaaatggcccgcctggcattatgcccagtacatgaccttatgggactttcctacttggcagtacatctacgtattagtcatcgctattaccatgtcgaggccacgttctgcttcactctccccatctcccccccctccccacccccaattttgtatttatttattttttaattattttgtgcagcgatgggggcggggggggggggcgcgcgccaggcggggcggggcggggcgaggggcggggcggggcgaggcggagaggtgcggcggcagccaatcagagcggcgcgctccgaaagtttccttttatggcgaggcggcggcggcggcggccctataaaaagcgaagcgcgcggcgggcgggagcaagcttcgtttagtgaaccgtcagatcgcctggagacgccatccacgctgttttgacctccatagaagacaccgggaccgatccagcctccgcggattcgaatcccggccgggaacggtgcattggaacgcggattccccgtgccaagagtgacgtaagtaccgcctatagagtctataggcccacaaaaaatgctttcttcttttaatatacttttttgtttatcttatttctaatactttccctaatctctttctttcagggcaataatgatacaatgtatcatgcctctttgcaccattctaaagaataacagtgataatttctgggttaaggcaatagcaatatttctgcatataaatatttctgcatataaattgtaactgatgtaagaggtttcatattgctaatagcagctacaatccagctaccattctgcttttattttatggttgggataaggctggattattctgagtccaagctaggcccttttgctaatcatgttcatacctcttatcttcctcccacagctcctgggcaacgtgctggtctgtgtgctggcccatcactttggcaaagaattgggattcgaaccggtgaagcaaagaaggggcagagggagcccgtgagctgagtgggccagggactgggagaaggagtgaggaggcagggccggcatgcctctgctgctggccagagactggaagcgatgacaatctgtctgcacctgtcactagtttgtcatcgcttccagtctttggccgtgtagtgctacccagcgctggctgcctcctcagcattgcaattcctctcccatctgggcaccagtcagctaccctggtgggaatctgggtagccctcgaggggtggcatccctgtgacccctccccagtgcctctcctggccctggaagttgccactccagtgcccaccagccttgtcctaataaaattaagttgcatcattttgtctgactaggtgtccttctataatattatggggtggaggggggtggtatggagcaaggggcaagttgggaagacaacctgtagggcctgcggggtctattgggaaccaagctggagtgcagtggcacaatcttggctcactgcaatctccgcctcctgggttcaagcgattctcctgcctcagcctcccgagttgttgggattccaggcatgcatgaccaggctcagctaatttttgtttttttggtagagacggggtttcaccatattggccaggctggtctccaactcctaatctcaggtgatctacccaccttggcctcccaaattgctgggattacaggcgtgaaccactgctcccttccctgtccttatcgatgctacgtagataagtagcatggcgggttaatcattaactacagaggaacccctagtgatggagttggccactccctctctgcgcgctcgctcgctcactgaggccgggcgaccaaaggtcgcccgacgcccgggctttgcccgggcggcctcagtgagcgagcgagcgcgcagctgcctgcagg

SEQ ID NO: 4465 - DNA, 2391 bp, synthetic construct
  source 1..2391: mol_type = other DNA
cctgcaggcagctgcgcgctcgctcgctcactgaggccgcccgggcaaagcccgggcgtcgggcgacctttggtcgcccggcctcagtgagcgagcgagcgcgcagagagggagtggccaactccatcactaggggttccttgtagttaatgattaacccgccatgctacttatctacgtagccatgcgtcgacataacgcgtcgacattgattattgactagttattaatagtaatcaattacggggtcattagttcatagcccatatatggagttccgcgttacataacttacggtaaatggcccgcctggctgaccgcccaacgacccccgcccattgacgtcaataatgacgtatgttcccatagtaacgccaatagggactttccattgacgtcaatgggtggagtatttacggtaaactgcccacttggcagtacatcaagtgtatcatatgccaagtacgccccctattgacgtcaatgacggtaaatggcccgcctggcattatgcccagtacatgaccttatgggactttcctacttggcagtacatctacgtattagtcatcgctattaccatgtcgaggccacgttctgcttcactctccccatctcccccccctccccacccccaattttgtatttatttattttttaattattttgtgcagcgatgggggcggggggggggggcgcgcgccaggcggggcggggcggggcgaggggcggggcggggcgaggcggagaggtgcggcggcagccaatcagagcggcgcgctccgaaagtttccttttatggcgaggcggcggcggcggcggccctataaaaagcgaagcgcgcggcgggcgggagcaagcttcgtttagtgaaccgtcagatcgcctggagacgccatccacgctgttttgacctccatagaagacaccgggaccgatccagcctccgcggattcgaatcccggccgggaacggtgcattggaacgcggattccccgtgccaagagtgacgtaagtaccgcctatagagtctataggcccacaaaaaatgctttcttcttttaatatacttttttgtttatcttatttctaatactttccctaatctctttctttcagggcaataatgatacaatgtatcatgcctctttgcaccattctaaagaataacagtgataatttctgggttaaggcaatagcaatatttctgcatataaatatttctgcatataaattgtaactgatgtaagaggtttcatattgctaatagcagctacaatccagctaccattctgcttttattttatggttgggataaggctggattattctgagtccaagctaggcccttttgctaatcatgttcatacctcttatcttcctcccacagctcctgggcaacgtgctggtctgtgtgctggcccatcactttggcaaagaattgggattcgaaccggtgaagcaaagaaggggcagagggagcccgtgagctgagtgggccagggactgggagaaggagtgaggaggcagggccggcatgcctctgctgctggccagacttccgcgagaacgccaatctgtctgcacctgtcactagtttggcgttctcgcggaagtttggccgtgtagtgctacccagcgctggctgcctcctcagcattgcaattcctctcccatctgggcaccagtcagctaccctggtgggaatctgggtagccctcgaggggtggcatccctgtgacccctccccagtgcctctcctggccctggaagttgccactccagtgcccaccagccttgtcctaataaaattaagttgcatcattttgtctgactaggtgtccttctataatattatggggtggaggggggtggtatggagcaaggggcaagttgggaagacaacctgtagggcctgcggggtctattgggaaccaagctggagtgcagtggcacaatcttggctcactgcaatctccgcctcctgggttcaagcgattctcctgcctcagcctcccgagttgttgggattccaggcatgcatgaccaggctcagctaatttttgtttttttggtagagacggggtttcaccatattggccaggctggtctccaactcctaatctcaggtgatctacccaccttggcctcccaaattgctgggattacaggcgtgaaccactgctcccttccctgtccttatcgatgctacgtagataagtagcatggcgggttaatcattaactacagaggaacccctagtgatggagttggccactccctctctgcgcgctcgctcgctcactgaggccgggcgaccaaaggtcgcccgacgcccgggctttgcccgggcggcctcagtgagcgagcgagcgcgcagctgcctgcagg

SEQ ID NO: 4466 - DNA, 2391 bp, synthetic construct
  source 1..2391: mol_type = other DNA
cctgcaggcagctgcgcgctcgctcgctcactgaggccgcccgggcaaagcccgggcgtcgggcgacctttggtcgcccggcctcagtgagcgagcgagcgcgcagagagggagtggccaactccatcactaggggttccttgtagttaatgattaacccgccatgctacttatctacgtagccatgcgtcgacataacgcgtcgacattgattattgactagttattaatagtaatcaattacggggtcattagttcatagcccatatatggagttccgcgttacataacttacggtaaatggcccgcctggctgaccgcccaacgacccccgcccattgacgtcaataatgacgtatgttcccatagtaacgccaatagggactttccattgacgtcaatgggtggagtatttacggtaaactgcccacttggcagtacatcaagtgtatcatatgccaagtacgccccctattgacgtcaatgacggtaaatggcccgcctggcattatgcccagtacatgaccttatgggactttcctacttggcagtacatctacgtattagtcatcgctattaccatgtcgaggccacgttctgcttcactctccccatctcccccccctccccacccccaattttgtatttatttattttttaattattttgtgcagcgatgggggcggggggggggggcgcgcgccaggcggggcggggcggggcgaggggcggggcggggcgaggcggagaggtgcggcggcagccaatcagagcggcgcgctccgaaagtttccttttatggcgaggcggcggcggcggcggccctataaaaagcgaagcgcgcggcgggcgggagcaagcttcgtttagtgaaccgtcagatcgcctggagacgccatccacgctgttttgacctccatagaagacaccgggaccgatccagcctccgcggattcgaatcccggccgggaacggtgcattggaacgcggattccccgtgccaagagtgacgtaagtaccgcctatagagtctataggcccacaaaaaatgctttcttcttttaatatacttttttgtttatcttatttctaatactttccctaatctctttctttcagggcaataatgatacaatgtatcatgcctctttgcaccattctaaagaataacagtgataatttctgggttaaggcaatagcaatatttctgcatataaatatttctgcatataaattgtaactgatgtaagaggtttcatattgctaatagcagctacaatccagctaccattctgcttttattttatggttgggataaggctggattattctgagtccaagctaggcccttttgctaatcatgttcatacctcttatcttcctcccacagctcctgggcaacgtgctggtctgtgtgctggcccatcactttggcaaagaattgggattcgaaccggtgaagcaaagaaggggcagagggagcccgtgagctgagtgggccagggactgggagaaggagtgaggaggcagggccggcatgcctctgctgctggccagagcatcgacatggtagacttctgtctgcacctgtcactagtagtctaccatgtcgatgctttggccgtgtagtgctacccagcgctggctgcctcctcagcattgcaattcctctcccatctgggcaccagtcagctaccctggtgggaatctgggtagccctcgaggggtggcatccctgtgacccctccccagtgcctctcctggccctggaagttgccactccagtgcccaccagccttgtcctaataaaattaagttgcatcattttgtctgactaggtgtccttctataatattatggggtggaggggggtggtatggagcaaggggcaagttgggaagacaacctgtagggcctgcggggtctattgggaaccaagctggagtgcagtggcacaatcttggctcactgcaatctccgcctcctgggttcaagcgattctcctgcctcagcctcccgagttgttgggattccaggcatgcatgaccaggctcagctaatttttgtttttttggtagagacggggtttcaccatattggccaggctggtctccaactcctaatctcaggtgatctacccaccttggcctcccaaattgctgggattacaggcgtgaaccactgctcccttccctgtccttatcgatgctacgtagataagtagcatggcgggttaatcattaactacagaggaacccctagtgatggagttggccactccctctctgcgcgctcgctcgctcactgaggccgggcgaccaaaggtcgcccgacgcccgggctttgcccgggcggcctcagtgagcgagcgagcgcgcagctgcctgcagg

SEQ ID NO: 4467 - DNA, 2391 bp, synthetic construct
  source 1..2391: mol_type = other DNA
cctgcaggcagctgcgcgctcgctcgctcactgaggccgcccgggcaaagcccgggcgtcgggcgacctttggtcgcccggcctcagtgagcgagcgagcgcgcagagagggagtggccaactccatcactaggggttccttgtagttaatgattaacccgccatgctacttatctacgtagccatgcgtcgacataacgcgtcgacattgattattgactagttattaatagtaatcaattacggggtcattagttcatagcccatatatggagttccgcgttacataacttacggtaaatggcccgcctggctgaccgcccaacgacccccgcccattgacgtcaataatgacgtatgttcccatagtaacgccaatagggactttccattgacgtcaatgggtggagtatttacggtaaactgcccacttggcagtacatcaagtgtatcatatgccaagtacgccccctattgacgtcaatgacggtaaatggcccgcctggcattatgcccagtacatgaccttatgggactttcctacttggcagtacatctacgtattagtcatcgctattaccatgtcgaggccacgttctgcttcactctccccatctcccccccctccccacccccaattttgtatttatttattttttaattattttgtgcagcgatgggggcggggggggggggcgcgcgccaggcggggcggggcggggcgaggggcggggcggggcgaggcggagaggtgcggcggcagccaatcagagcggcgcgctccgaaagtttccttttatggcgaggcggcggcggcggcggccctataaaaagcgaagcgcgcggcgggcgggagcaagcttcgtttagtgaaccgtcagatcgcctggagacgccatccacgctgttttgacctccatagaagacaccgggaccgatccagcctccgcggattcgaatcccggccgggaacggtgcattggaacgcggattccccgtgccaagagtgacgtaagtaccgcctatagagtctataggcccacaaaaaatgctttcttcttttaatatacttttttgtttatcttatttctaatactttccctaatctctttctttcagggcaataatgatacaatgtatcatgcctctttgcaccattctaaagaataacagtgataatttctgggttaaggcaatagcaatatttctgcatataaatatttctgcatataaattgtaactgatgtaagaggtttcatattgctaatagcagctacaatccagctaccattctgcttttattttatggttgggataaggctggattattctgagtccaagctaggcccttttgctaatcatgttcatacctcttatcttcctcccacagctcctgggcaacgtgctggtctgtgtgctggcccatcactttggcaaagaattgggattcgaaccggtgaagcaaagaaggggcagagggagcccgtgagctgagtgggccagggactgggagaaggagtgaggaggcagggccggcatgcctctgctgctggccagagctcctcgcagttcggtttctgtctgcacctgtcactagtaaccgaactgcgaggagctttggccgtgtagtgctacccagcgctggctgcctcctcagcattgcaattcctctcccatctgggcaccagtcagctaccctggtgggaatctgggtagccctcgaggggtggcatccctgtgacccctccccagtgcctctcctggccctggaagttgccactccagtgcccaccagccttgtcctaataaaattaagttgcatcattttgtctgactaggtgtccttctataatattatggggtggaggggggtggtatggagcaaggggcaagttgggaagacaacctgtagggcctgcggggtctattgggaaccaagctggagtgcagtggcacaatcttggctcactgcaatctccgcctcctgggttcaagcgattctcctgcctcagcctcccgagttgttgggattccaggcatgcatgaccaggctcagctaatttttgtttttttggtagagacggggtttcaccatattggccaggctggtctccaactcctaatctcaggtgatctacccaccttggcctcccaaattgctgggattacaggcgtgaaccactgctcccttccctgtccttatcgatgctacgtagataagtagcatggcgggttaatcattaactacagaggaacccctagtgatggagttggccactccctctctgcgcgctcgctcgctcactgaggccgggcgaccaaaggtcgcccgacgcccgggctttgcccgggcggcctcagtgagcgagcgagcgcgcagctgcctgcagg

SEQ ID NO: 4468 - DNA, 2391 bp, synthetic construct
  source 1..2391: mol_type = other DNA
cctgcaggcagctgcgcgctcgctcgctcactgaggccgcccgggcaaagcccgggcgtcgggcgacctttggtcgcccggcctcagtgagcgagcgagcgcgcagagagggagtggccaactccatcactaggggttccttgtagttaatgattaacccgccatgctacttatctacgtagccatgcgtcgacataacgcgtcgacattgattattgactagttattaatagtaatcaattacggggtcattagttcatagcccatatatggagttccgcgttacataacttacggtaaatggcccgcctggctgaccgcccaacgacccccgcccattgacgtcaataatgacgtatgttcccatagtaacgccaatagggactttccattgacgtcaatgggtggagtatttacggtaaactgcccacttggcagtacatcaagtgtatcatatgccaagtacgccccctattgacgtcaatgacggtaaatggcccgcctggcattatgcccagtacatgaccttatgggactttcctacttggcagtacatctacgtattagtcatcgctattaccatgtcgaggccacgttctgcttcactctccccatctcccccccctccccacccccaattttgtatttatttattttttaattattttgtgcagcgatgggggcggggggggggggcgcgcgccaggcggggcggggcggggcgaggggcggggcggggcgaggcggagaggtgcggcggcagccaatcagagcggcgcgctccgaaagtttccttttatggcgaggcggcggcggcggcggccctataaaaagcgaagcgcgcggcgggcgggagcaagcttcgtttagtgaaccgtcagatcgcctggagacgccatccacgctgttttgacctccatagaagacaccgggaccgatccagcctccgcggattcgaatcccggccgggaacggtgcattggaacgcggattccccgtgccaagagtgacgtaagtaccgcctatagagtctataggcccacaaaaaatgctttcttcttttaatatacttttttgtttatcttatttctaatactttccctaatctctttctttcagggcaataatgatacaatgtatcatgcctctttgcaccattctaaagaataacagtgataatttctgggttaaggcaatagcaatatttctgcatataaatatttctgcatataaattgtaactgatgtaagaggtttcatattgctaatagcagctacaatccagctaccattctgcttttattttatggttgggataaggctggattattctgagtccaagctaggcccttttgctaatcatgttcatacctcttatcttcctcccacagctcctgggcaacgtgctggtctgtgtgctggcccatcactttggcaaagaattgggattcgaaccggtgaagcaaagaaggggcagagggagcccgtgagctgagtgggccagggactgggagaaggagtgaggaggcagggccggcatgcctctgctgctggccagaggctttggctcgggactttctgtctgcacctgtcactagtaagtcccgagccaaagcctttggccgtgtagtgctacccagcgctggctgcctcctcagcattgcaattcctctcccatctgggcaccagtcagctaccctggtgggaatctgggtagccctcgaggggtggcatccctgtgacccctccccagtgcctctcctggccctggaagttgccactccagtgcccaccagccttgtcctaataaaattaagttgcatcattttgtctgactaggtgtccttctataatattatggggtggaggggggtggtatggagcaaggggcaagttgggaagacaacctgtagggcctgcggggtctattgggaaccaagctggagtgcagtggcacaatcttggctcactgcaatctccgcctcctgggttcaagcgattctcctgcctcagcctcccgagttgttgggattccaggcatgcatgaccaggctcagctaatttttgtttttttggtagagacggggtttcaccatattggccaggctggtctccaactcctaatctcaggtgatctacccaccttggcctcccaaattgctgggattacaggcgtgaaccactgctcccttccctgtccttatcgatgctacgtagataagtagcatggcgggttaatcattaactacagaggaacccctagtgatggagttggccactccctctctgcgcgctcgctcgctcactgaggccgggcgaccaaaggtcgcccgacgcccgggctttgcccgggcggcctcagtgagcgagcgagcgcgcagctgcctgcagg

SEQ ID NO: 4469 - DNA, 141 bp, synthetic construct
  source 1..141: mol_type = other DNA
cctgcaggcagctgcgcgctcgctcgctcactgaggccgcccgggcaaagcccgggcgtcgggcgacctttggtcgcccggcctcagtgagcgagcgagcgcgcagagagggagtggccaactccatcactaggggttcct

SEQ ID NO: 4470 - DNA, 141 bp, synthetic construct
  source 1..141: mol_type = other DNA
aggaacccctagtgatggagttggccactccctctctgcgcgctcgctcgctcactgaggccgggcgaccaaaggtcgcccgacgcccgggctttgcccgggcggcctcagtgagcgagcgagcgcgcagctgcctgcagg

SEQ ID NO: 4471 - DNA, 380 bp, synthetic construct
  source 1..380: mol_type = other DNA
gacattgattattgactagttattaatagtaatcaattacggggtcattagttcatagcccatatatggagttccgcgttacataacttacggtaaatggcccgcctggctgaccgcccaacgacccccgcccattgacgtcaataatgacgtatgttcccatagtaacgccaatagggactttccattgacgtcaatgggtggagtatttacggtaaactgcccacttggcagtacatcaagtgtatcatatgccaagtacgccccctattgacgtcaatgacggtaaatggcccgcctggcattatgcccagtacatgaccttatgggactttcctacttggcagtacatctacgtattagtcatcgctattaccatg

SEQ ID NO: 4472 - DNA, 382 bp, synthetic construct
  source 1..382: mol_type = other DNA
cgcgtcgacattgattattgactagttattaatagtaatcaattacggggtcattagttcatagcccatatatggagttccgcgttacataacttacggtaaatggcccgcctggctgaccgcccaacgacccccgcccattgacgtcaataatgacgtatgttcccatagtaacgccaatagggactttccattgacgtcaatgggtggagtatttacggtaaactgcccacttggcagtacatcaagtgtatcatatgccaagtacgccccctattgacgtcaatgacggtaaatggcccgcctggcattatgcccagtacatgaccttatgggactttcctacttggcagtacatctacgtattagtcatcgctattac

SEQ ID NO: 4473 - DNA, 654 bp, synthetic construct
  source 1..654: mol_type = other DNA
cgacattgattattgactagttattaatagtaatcaattacggggtcattagttcatagcccatatatggagttccgcgttacataacttacggtaaatggcccgcctggctgaccgcccaacgacccccgcccattgacgtcaataatgacgtatgttcccatagtaacgccaatagggactttccattgacgtcaatgggtggagtatttacggtaaactgcccacttggcagtacatcaagtgtatcatatgccaagtacgccccctattgacgtcaatgacggtaaatggcccgcctggcattatgcccagtacatgaccttatgggactttcctacttggcagtacatctacgtattagtcatcgctattaccatgtcgaggccacgttctgcttcactctccccatctcccccccctccccacccccaattttgtatttatttattttttaattattttgtgcagcgatgggggcggggggggggggcgcgcgccaggcggggcggggcggggcgaggggcggggcggggcgaggcggagaggtgcggcggcagccaatcagagcggcgcgctccgaaagtttccttttatggcgaggcggcggcggcggcggccctataaaaagcgaagcgcgcggcgggcgggagc

SEQ ID NO: 4474 - DNA, 659 bp, synthetic construct
  source 1..659: mol_type = other DNA
cgcgtcgacattgattattgactagttattaatagtaatcaattacggggtcattagttcatagcccatatatggagttccgcgttacataacttacggtaaatggcccgcctggctgaccgcccaacgacccccgcccattgacgtcaataatgacgtatgttcccatagtaacgccaatagggactttccattgacgtcaatgggtggagtatttacggtaaactgcccacttggcagtacatcaagtgtatcatatgccaagtacgccccctattgacgtcaatgacggtaaatggcccgcctggcattatgcccagtacatgaccttatgggactttcctacttggcagtacatctacgtattagtcatcgctattaccatgtcgaggccacgttctgcttcactctccccatctcccccccctccccacccccaattttgtatttatttattttttaattattttgtgcagcgatgggggcggggggggggggcgcgcgccaggcggggcggggcggggcgaggggcggggcggggcgaggcggagaggtgcggcggcagccaatcagagcggcgcgctccgaaagtttccttttatggcgaggcggcggcggcggcggccctataaaaagcgaagcgcgcggcgggcgggagc

SEQ ID NO: 4475 - DNA, 566 bp, synthetic construct
  source 1..566: mol_type = other DNA
tcagatcgcctggagacgccatccacgctgttttgacctccatagaagacaccgggaccgatccagcctccgcggattcgaatcccggccgggaacggtgcattggaacgcggattccccgtgccaagagtgacgtaagtaccgcctatagagtctataggcccacaaaaaatgctttcttcttttaatatacttttttgtttatcttatttctaatactttccctaatctctttctttcagggcaataatgatacaatgtatcatgcctctttgcaccattctaaagaataacagtgataatttctgggttaaggcaatagcaatatttctgcatataaatatttctgcatataaattgtaactgatgtaagaggtttcatattgctaatagcagctacaatccagctaccattctgcttttattttatggttgggataaggctggattattctgagtccaagctaggcccttttgctaatcatgttcatacctcttatcttcctcccacagctcctgggcaacgtgctggtctgtgtgctggcccatcactttggcaaagaatt

SEQ ID NO: 4476 - DNA, 477 bp, synthetic construct
  source 1..477: mol_type = other DNA
gggtggcatccctgtgacccctccccagtgcctctcctggccctggaagttgccactccagtgcccaccagccttgtcctaataaaattaagttgcatcattttgtctgactaggtgtccttctataatattatggggtggaggggggtggtatggagcaaggggcaagttgggaagacaacctgtagggcctgcggggtctattgggaaccaagctggagtgcagtggcacaatcttggctcactgcaatctccgcctcctgggttcaagcgattctcctgcctcagcctcccgagttgttgggattccaggcatgcatgaccaggctcagctaatttttgtttttttggtagagacggggtttcaccatattggccaggctggtctccaactcctaatctcaggtgatctacccaccttggcctcccaaattgctgggattacaggcgtgaaccactgctcccttccctgtcctt

SEQ ID NO: 4477 - RNA, 19 nt, synthetic construct
  source 1..19: mol_type = other RNA
gctttggctcgggacttcc

SEQ ID NO: 4478 - RNA, 19 nt, synthetic construct
  source 1..19: mol_type = other RNA
cgacatggtagactcgccc

SEQ ID NO: 4479 - RNA, 19 nt, synthetic construct
  source 1..19: mol_type = other RNA
ctcctcgcagttcggttac

SEQ ID NO: 4480 - RNA, 19 nt, synthetic construct
  source 1..19: mol_type = other RNA
ggctttggctcgggacttc

SEQ ID NO: 4481 - RNA, 19 nt, synthetic construct
  source 1..19: mol_type = other RNA
ggctttggctcgggactta

SEQ ID NO: 4482 - RNA, 19 nt, synthetic construct
  source 1..19: mol_type = other RNA
ggctttggctcgggacttt

SEQ ID NO: 4483 - RNA, 19 nt, synthetic construct
  source 1..19: mol_type = other RNA
ggctttggcacgggacttc

SEQ ID NO: 4484 - RNA, 19 nt, synthetic construct
  source 1..19: mol_type = other RNA
ggctttggctcgggacttg

SEQ ID NO: 4485 - RNA, 19 nt, synthetic construct
  source 1..19: mol_type = other RNA
gcatcgacatggtagactc

SEQ ID NO: 4486 - RNA, 19 nt, synthetic construct
  source 1..19: mol_type = other RNA
gcatcgacatggtagacta

SEQ ID NO: 4487 - RNA, 19 nt, synthetic construct
  source 1..19: mol_type = other RNA
gcatcgacatggtagactt

SEQ ID NO: 4488 - RNA, 19 nt, synthetic construct
  source 1..19: mol_type = other RNA
gcatcgacaaggtagactc

SEQ ID NO: 4489 - RNA, 19 nt, synthetic construct
  source 1..19: mol_type = other RNA
gcatcgacatggtagactg

SEQ ID NO: 4490 - RNA, 19 nt, synthetic construct
  source 1..19: mol_type = other RNA
tgctcctcgcagttcggtc

SEQ ID NO: 4491 - RNA, 19 nt, synthetic construct
  source 1..19: mol_type = other RNA
cacccaagtcgccgtcttc

SEQ ID NO: 4492 - RNA, 19 nt, synthetic construct
  source 1..19: mol_type = other RNA
cctcgcagttcggttaatc

SEQ ID NO: 4493 - RNA, 19 nt, synthetic construct
  source 1..19: mol_type = other RNA
tcctcgcagttcggttaac

SEQ ID NO: 4494 - RNA, 19 nt, synthetic construct
  source 1..19: mol_type = other RNA
agctgaccttccgcgagac

SEQ ID NO: 4495 - RNA, 19 nt, synthetic construct
  source 1..19: mol_type = other RNA
gactggaagcgatgacaac

SEQ ID NO: 4496 - RNA, 19 nt, synthetic construct
  source 1..19: mol_type = other RNA
gactggaagcgatgacaaa

SEQ ID NO: 4497 - RNA, 19 nt, synthetic construct
  source 1..19: mol_type = other RNA
gactggaagcgatgacaat

SEQ ID NO: 4498 - RNA, 19 nt, synthetic construct
  source 1..19: mol_type = other RNA
gactggaagggatgacaac

SEQ ID NO: 4499 - RNA, 19 nt, synthetic construct
  source 1..19: mol_type = other RNA
gactggaagcgatgacaag

SEQ ID NO: 4500 - RNA, 19 nt, synthetic construct
  source 1..19: mol_type = other RNA
agctcgcatggtcagtaac

SEQ ID NO: 4501 - RNA, 19 nt, synthetic construct
  source 1..19: mol_type = other RNA
agtctacaaaccagttgac

SEQ ID NO: 4502 - RNA, 19 nt, synthetic construct
  source 1..19: mol_type = other RNA
gctcctcgcagttcggttc

SEQ ID NO: 4503 - RNA, 19 nt, synthetic construct
  source 1..19: mol_type = other RNA
gctcctcgcagttcggttg

SEQ ID NO: 4504 - RNA, 19 nt, synthetic construct
  source 1..19: mol_type = other RNA
gctcctcgcagttcggttt

SEQ ID NO: 4505 - RNA, 19 nt, synthetic construct
  source 1..19: mol_type = other RNA
gctcctcgctgttcggttc

SEQ ID NO: 4506 - RNA, 19 nt, synthetic construct
  source 1..19: mol_type = other RNA
cttccgcgagaacgccaac

SEQ ID NO: 4507 - RNA, 19 nt, synthetic construct
  source 1..19: mol_type = other RNA
cttccgcgagaacgccaaa

SEQ ID NO: 4508 - RNA, 19 nt, synthetic construct
  source 1..19: mol_type = other RNA
cttccgcgagaacgccaat

SEQ ID NO: 4509 - RNA, 19 nt, synthetic construct
  source 1..19: mol_type = other RNA
cttccgcgacaacgccaac

SEQ ID NO: 4510 - RNA, 19 nt, synthetic construct
  source 1..19: mol_type = other RNA
cttccgcgagaacgccaag

SEQ ID NO: 4511 - RNA, 19 nt, synthetic construct
  source 1..19: mol_type = other RNA
aaatcagtgatgggagtac

SEQ ID NO: 4512 - RNA, 19 nt, synthetic construct
  source 1..19: mol_type = other RNA
gtcgccgtcttccgccaac

SEQ ID NO: 4513 - RNA, 19 nt, synthetic construct
  source 1..19: mol_type = other RNA
atggtaaaacgaagatcgc

SEQ ID NO: 4514 - RNA, 19 nt, synthetic construct
  source 1..19: mol_type = other RNA
acgaagatcgccacaccgc

SEQ ID NO: 4515 - RNA, 19 nt, synthetic construct
  source 1..19: mol_type = other RNA
cgcagttcggttaattggc

SEQ ID NO: 4516 - RNA, 19 nt, synthetic construct
  source 1..19: mol_type = other RNA
gtactccacccaagtcgcc

SEQ ID NO: 4517 - RNA, 19 nt, synthetic construct
  source 1..19: mol_type = other RNA
ctcggctttggctcgggac

SEQ ID NO: 4518 - RNA, 19 nt, synthetic construct
  source 1..19: mol_type = other RNA
gcccctggggcggtcaatc

SEQ ID NO: 4519 - RNA, 19 nt, synthetic construct
  source 1..19: mol_type = other RNA
ctcgcagttcggttaattc

SEQ ID NO: 4520 - RNA, 19 nt, synthetic construct
  source 1..19: mol_type = other RNA
tcgccgtcttccgccaagc

SEQ ID NO: 4521 - RNA, 19 nt, synthetic construct
  source 1..19: mol_type = other RNA
gacgggactggaagcgatc

SEQ ID NO: 4522 - RNA, 19 nt, synthetic construct
  source 1..19: mol_type = other RNA
tggtaaaacgaagatcgcc

SEQ ID NO: 4523 - RNA, 19 nt, synthetic construct
  source 1..19: mol_type = other RNA
gtaaaacgaagatcgccac

SEQ ID NO: 4524 - RNA, 19 nt, synthetic construct
  source 1..19: mol_type = other RNA
acaatatcacccacgtccc

SEQ ID NO: 4525 - RNA, 19 nt, synthetic construct
  source 1..19: mol_type = other RNA
ccttccgcgagaacgccac

SEQ ID NO: 4526 - RNA, 19 nt, synthetic construct
  source 1..19: mol_type = other RNA
gggggctgatggtaaaacc

SEQ ID NO: 4527 - RNA, 19 nt, synthetic construct
  source 1..19: mol_type = other RNA
gccgtcttccgccaagagc

SEQ ID NO: 4528 - RNA, 19 nt, synthetic construct
  source 1..19: mol_type = other RNA
caccggcagcatcgacatc

SEQ ID NO: 4529 - RNA, 19 nt, synthetic construct
  source 1..19: mol_type = other RNA
gtaaaagcaaagacgggac

SEQ ID NO: 4530 - RNA, 19 nt, synthetic construct
  source 1..19: mol_type = other RNA
aggtttctaacccaccctc

SEQ ID NO: 4531 - RNA, 19 nt, synthetic construct
  source 1..19: mol_type = other RNA
ttccgcgagaacgccaaac

SEQ ID NO: 4532 - RNA, 19 nt, synthetic construct
  source 1..19: mol_type = other RNA
gaccttccgcgagaacgcc

SEQ ID NO: 4533 - RNA, 19 nt, synthetic construct
  source 1..19: mol_type = other RNA
cgccacgctagctgacgac

SEQ ID NO: 4534 - RNA, 19 nt, synthetic construct
  source 1..19: mol_type = other RNA
acctgcgtgtcccatctac

SEQ ID NO: 4535 - RNA, 19 nt, synthetic construct
  source 1..19: mol_type = other RNA
ccccagctcgccacgctac

SEQ ID NO: 4536 - RNA, 19 nt, synthetic construct
  source 1..19: mol_type = other RNA
gccgttcagctgtgacgac

SEQ ID NO: 4537 - RNA, 19 nt, synthetic construct
  source 1..19: mol_type = other RNA
gctgatggtaaaacgaagc

SEQ ID NO: 4538 - RNA, 19 nt, synthetic construct
  source 1..19: mol_type = other RNA
acgaggtgtctctcacccc

SEQ ID NO: 4539 - RNA, 19 nt, synthetic construct
  source 1..19: mol_type = other RNA
gggccagcctaagatcatc

SEQ ID NO: 4540 - RNA, 19 nt, synthetic construct
  source 1..19: mol_type = other RNA
tctaacccaccctcacgac

SEQ ID NO: 4541 - RNA, 19 nt, synthetic construct
  source 1..19: mol_type = other RNA
taaagaggtttctaacccc

SEQ ID NO: 4542 - RNA, 19 nt, synthetic construct
  source 1..19: mol_type = other RNA
ctcacctcctaatagactc

SEQ ID NO: 4543 - RNA, 19 nt, synthetic construct
  source 1..19: mol_type = other RNA
ggatatactgtatgccggc

SEQ ID NO: 4544 - RNA, 19 nt, synthetic construct
  source 1..19: mol_type = other RNA
caccctcacgaggtgtctc

SEQ ID NO: 4545 - RNA, 19 nt, synthetic construct
  source 1..19: mol_type = other RNA
cacgctagctgacgaggtc

SEQ ID NO: 4546 - RNA, 19 nt, synthetic construct
  source 1..19: mol_type = other RNA
tcccatgatttcttcggtc

SEQ ID NO: 4547 - RNA, 19 nt, synthetic construct
  source 1..19: mol_type = other RNA
ttgagttgtagttggattc

SEQ ID NO: 4548 - RNA, 19 nt, synthetic construct
  source 1..19: mol_type = other RNA
ctgcgtgtcccatctacac

SEQ ID NO: 4549 - RNA, 19 nt, synthetic construct
  source 1..19: mol_type = other RNA
gttgagttgtagttggatc

SEQ ID NO: 4550 - RNA, 19 nt, synthetic construct
  source 1..19: mol_type = other RNA
ggtggtggttagagatatc

SEQ ID NO: 4551 - RNA, 19 nt, synthetic construct
  source 1..19: mol_type = other RNA
gggctagataggatatacc

SEQ ID NO: 4552 - RNA, 19 nt, synthetic construct
  source 1..19: mol_type = other RNA
aggattccagcaaaaaccc

SEQ ID NO: 4553 - RNA, 19 nt, synthetic construct
  source 1..19: mol_type = other RNA
ggcccctggggcggtcaac

SEQ ID NO: 4554 - RNA, 19 nt, synthetic construct
  source 1..19: mol_type = other RNA
gattaggactgaagcgatc

SEQ ID NO: 4555 - RNA, 19 nt, synthetic construct
  source 1..19: mol_type = other RNA
ctcccaagttttgaaaggc

SEQ ID NO: 4556 - RNA, 19 nt, synthetic construct
  source 1..19: mol_type = other RNA
gctggtctggcttgcggcc

SEQ ID NO: 4557 - RNA, 19 nt, synthetic construct
  source 1..19: mol_type = other RNA
gttccactcatccaactgc

SEQ ID NO: 4558 - RNA, 19 nt, synthetic construct
  source 1..19: mol_type = other RNA
cacctcctaatagacttac

SEQ ID NO: 4559 - RNA, 19 nt, synthetic construct
  source 1..19: mol_type = other RNA
ttctaacccaccctcacgc

SEQ ID NO: 4560 - RNA, 19 nt, synthetic construct
  source 1..19: mol_type = other RNA
aagcccacaatcatgcctc

SEQ ID NO: 4561 - RNA, 19 nt, synthetic construct
  source 1..19: mol_type = other RNA
accttccgcgagaacgccc

SEQ ID NO: 4562 - RNA, 19 nt, synthetic construct
  source 1..19: mol_type = other RNA
gctggtcacgtgacccaac

SEQ ID NO: 4563 - RNA, 19 nt, synthetic construct
  source 1..19: mol_type = other RNA
taacccaccctcacgaggc

SEQ ID NO: 4564 - RNA, 19 nt, synthetic construct
  source 1..19: mol_type = other RNA
cttacaactcctgcatcac

SEQ ID NO: 4565 - RNA, 19 nt, synthetic construct
  source 1..19: mol_type = other RNA
tgggactttagggctaacc

SEQ ID NO: 4566 - RNA, 19 nt, synthetic construct
  source 1..19: mol_type = other RNA
gccacaggcagacgatgtc

SEQ ID NO: 4567 - RNA, 19 nt, synthetic construct
  source 1..19: mol_type = other RNA
gcctcttgggagacgtccc

SEQ ID NO: 4568 - RNA, 19 nt, synthetic construct
  source 1..19: mol_type = other RNA
gagatatgcccccctcatc

SEQ ID NO: 4569 - RNA, 19 nt, synthetic construct
  source 1..19: mol_type = other RNA
tcccaagttttgaaaggcc

SEQ ID NO: 4570 - RNA, 19 nt, synthetic construct
  source 1..19: mol_type = other RNA
agttattactctgattaac

SEQ ID NO: 4571 - RNA, 19 nt, synthetic construct
  source 1..19: mol_type = other RNA
tatgcccccctcattactc

SEQ ID NO: 4572 - RNA, 19 nt, synthetic construct
  source 1..19: mol_type = other RNA
caaaatcaggggatcgcac

SEQ ID NO: 4573 - DNA, 19 bp, synthetic construct
  source 1..19: mol_type = other DNA
cagaccacggggcggagac

SEQ ID NO: 4574 - RNA, 19 nt, synthetic construct
  source 1..19: mol_type = other RNA
cttgggtgggctagatagc

SEQ ID NO: 4575 - RNA, 19 nt, synthetic construct
  source 1..19: mol_type = other RNA
ctcgccacgctagctgacc

SEQ ID NO: 4576 - RNA, 19 nt, synthetic construct
  source 1..19: mol_type = other RNA
tgttgagttgtagttggac

SEQ ID NO: 4577 - RNA, 19 nt, synthetic construct
  source 1..19: mol_type = other RNA
tatacatagatgttgcccc

SEQ ID NO: 4578 - RNA, 19 nt, synthetic construct
  source 1..19: mol_type = other RNA
aacccaccctcacgaggtc

SEQ ID NO: 4579 - RNA, 19 nt, synthetic construct
  source 1..19: mol_type = other RNA
gttgagcaggactatttcc

SEQ ID NO: 4580 - RNA, 19 nt, synthetic construct
  source 1..19: mol_type = other RNA
ccacgctagctgacgaggc

SEQ ID NO: 4581 - RNA, 19 nt, synthetic construct
  source 1..19: mol_type = other RNA
ctcctaatagacttagccc

SEQ ID NO: 4582 - RNA, 19 nt, synthetic construct
  source 1..19: mol_type = other RNA
gatttcttcggtaattctc

SEQ ID NO: 4583 - RNA, 19 nt, synthetic construct
  source 1..19: mol_type = other RNA
gtcccaaaggaggcttacc

SEQ ID NO: 4584 - RNA, 19 nt, synthetic construct
  source 1..19: mol_type = other RNA
ggtggttagagatatgccc

SEQ ID NO: 4585 - RNA, 19 nt, synthetic construct
  source 1..19: mol_type = other RNA
ggctagataggatatactc

SEQ ID NO: 4586 - RNA, 19 nt, synthetic construct
  source 1..19: mol_type = other RNA
attcaccagagtgactatc

SEQ ID NO: 4587 - RNA, 19 nt, synthetic construct
  source 1..19: mol_type = other RNA
gatatactgtatgccggcc

SEQ ID NO: 4588 - RNA, 19 nt, synthetic construct
  source 1..19: mol_type = other RNA
gaccacagcagggattggc

SEQ ID NO: 4589 - RNA, 19 nt, synthetic construct
  source 1..19: mol_type = other RNA
gagccacaggcagacgatc

SEQ ID NO: 4590 - RNA, 19 nt, synthetic construct
  source 1..19: mol_type = other RNA
ctagctgacgaggtgtctc

SEQ ID NO: 4591 - RNA, 19 nt, synthetic construct
  source 1..19: mol_type = other RNA
aagggggctgatggtaaac

SEQ ID NO: 4592 - RNA, 19 nt, synthetic construct
  source 1..19: mol_type = other RNA
atcaggggatcgcagcggc

SEQ ID NO: 4593 - RNA, 19 nt, synthetic construct
  source 1..19: mol_type = other RNA
cccagctcgccacgctagc

SEQ ID NO: 4594 - RNA, 19 nt, synthetic construct
  source 1..19: mol_type = other RNA
cgttcagctgtgacgaagc

SEQ ID NO: 4595 - RNA, 19 nt, synthetic construct
  source 1..19: mol_type = other RNA
cacttgcaagtcccatgac

SEQ ID NO: 4596 - RNA, 19 nt, synthetic construct
  source 1..19: mol_type = other RNA
tgggctagataggatatac

SEQ ID NO: 4597 - RNA, 19 nt, synthetic construct
  source 1..19: mol_type = other RNA
tttatgcttggattcaccc

SEQ ID NO: 4598 - RNA, 19 nt, synthetic construct
  source 1..19: mol_type = other RNA
ccaaaatcaggggatcgcc

SEQ ID NO: 4599 - RNA, 19 nt, synthetic construct
  source 1..19: mol_type = other RNA
ccgttcagctgtgacgaac

SEQ ID NO: 4600 - RNA, 19 nt, synthetic construct
  source 1..19: mol_type = other RNA
ggccacatccaacatttcc

SEQ ID NO: 4601 - RNA, 19 nt, synthetic construct
  source 1..19: mol_type = other RNA
tttatcaatagttccattc

SEQ ID NO: 4602 - RNA, 19 nt, synthetic construct
  source 1..19: mol_type = other RNA
ggcggagatcgtgtacaac

SEQ ID NO: 4603 - RNA, 19 nt, synthetic construct
  source 1..19: mol_type = other RNA
tcgccacgctagctgacgc

SEQ ID NO: 4604 - RNA, 19 nt, synthetic construct
  source 1..19: mol_type = other RNA
gtctggcttgcggcgcgac

SEQ ID NO: 4605 - RNA, 19 nt, synthetic construct
  source 1..19: mol_type = other RNA
acctcctaatagacttagc

SEQ ID NO: 4606 - RNA, 19 nt, synthetic construct
  source 1..19: mol_type = other RNA
tgtcccatctacagacctc

SEQ ID NO: 4607 - RNA, 19 nt, synthetic construct
  source 1..19: mol_type = other RNA
cggtaattctgagggtggc

SEQ ID NO: 4608 - RNA, 19 nt, synthetic construct
  source 1..19: mol_type = other RNA
tttcttcggtaattctgac

SEQ ID NO: 4609 - RNA, 19 nt, synthetic construct
  source 1..19: mol_type = other RNA
gcaccctgttgagttgtac

SEQ ID NO: 4610 - RNA, 19 nt, synthetic construct
  source 1..19: mol_type = other RNA
atatactgtatgccggctc

SEQ ID NO: 4611 - RNA, 19 nt, synthetic construct
  source 1..19: mol_type = other RNA
acttctggtttgggtacac

SEQ ID NO: 4612 - RNA, 19 nt, synthetic construct
  source 1..19: mol_type = other RNA
gaagcacaggattaggacc

SEQ ID NO: 4613 - RNA, 19 nt, synthetic construct
  source 1..19: mol_type = other RNA
ctttcaggggtcctaagcc

SEQ ID NO: 4614 - RNA, 19 nt, synthetic construct
  source 1..19: mol_type = other RNA
gatatgcccccctcattac

SEQ ID NO: 4615 - RNA, 19 nt, synthetic construct
  source 1..19: mol_type = other RNA
ctaaggaggccgttcagcc

SEQ ID NO: 4616 - RNA, 19 nt, synthetic construct
  source 1..19: mol_type = other RNA
ggaacacacccccttggac

SEQ ID NO: 4617 - RNA, 19 nt, synthetic construct
  source 1..19: mol_type = other RNA
cctaagcccacaatcatgc

SEQ ID NO: 4618 - RNA, 19 nt, synthetic construct
  source 1..19: mol_type = other RNA
ctggggcctcccaagtttc

SEQ ID NO: 4619 - RNA, 19 nt, synthetic construct
  source 1..19: mol_type = other RNA
tgtcccccacttgcacccc

SEQ ID NO: 4620 - RNA, 19 nt, synthetic construct
  source 1..19: mol_type = other RNA
aagttattactctgattac

SEQ ID NO: 4621 - RNA, 19 nt, synthetic construct
  source 1..19: mol_type = other RNA
aatagacttagccccatgc

SEQ ID NO: 4622 - RNA, 19 nt, synthetic construct
  source 1..19: mol_type = other RNA
cagtaatgaccctggttgc

SEQ ID NO: 4623 - RNA, 19 nt, synthetic construct
  source 1..19: mol_type = other RNA
ggaggaatgtgtaagatac

SEQ ID NO: 4624 - RNA, 19 nt, synthetic construct
  source 1..19: mol_type = other RNA
caatcatgcctccctaagc

SEQ ID NO: 4625 - RNA, 19 nt, synthetic construct
  source 1..19: mol_type = other RNA
tccactcatccaactgggc

SEQ ID NO: 4626 - RNA, 19 nt, synthetic construct
  source 1..19: mol_type = other RNA
aggtgcaggcgtaggaatc

SEQ ID NO: 4627 - RNA, 19 nt, synthetic construct
  source 1..19: mol_type = other RNA
gataggatatactgtatgc

SEQ ID NO: 4628 - RNA, 19 nt, synthetic construct
  source 1..19: mol_type = other RNA
tcctaagcccacaatcatc

SEQ ID NO: 4629 - RNA, 19 nt, synthetic construct
  source 1..19: mol_type = other RNA
ggccgttcagctgtgacgc

SEQ ID NO: 4630 - RNA, 19 nt, synthetic construct
  source 1..19: mol_type = other RNA
tggccacatccaacatttc

SEQ ID NO: 4631 - RNA, 19 nt, synthetic construct
  source 1..19: mol_type = other RNA
agcaggactatttctggcc

SEQ ID NO: 4632 - RNA, 19 nt, synthetic construct
  source 1..19: mol_type = other RNA
atatggacatctggttgcc

SEQ ID NO: 4633 - RNA, 19 nt, synthetic construct
  source 1..19: mol_type = other RNA
acttgcaccctagcttgtc

SEQ ID NO: 4634 - RNA, 19 nt, synthetic construct
  source 1..19: mol_type = other RNA
gtaaagaggtttctaaccc

SEQ ID NO: 4635 - RNA, 19 nt, synthetic construct
  source 1..19: mol_type = other RNA
gactcactttatcaatagc

SEQ ID NO: 4636 - RNA, 19 nt, synthetic construct
  source 1..19: mol_type = other RNA
agctgctgactcactttac

SEQ ID NO: 4637 - RNA, 19 nt, synthetic construct
  source 1..19: mol_type = other RNA
aagggttaccctgggcacc

SEQ ID NO: 4638 - RNA, 19 nt, synthetic construct
  source 1..19: mol_type = other RNA
tgtaaagaggtttctaacc

SEQ ID NO: 4639 - RNA, 19 nt, synthetic construct
  source 1..19: mol_type = other RNA
tggcttgcggcgcgaggac

SEQ ID NO: 4640 - RNA, 19 nt, synthetic construct
  source 1..19: mol_type = other RNA
gccacgctagctgacgagc

SEQ ID NO: 4641 - RNA, 19 nt, synthetic construct
  source 1..19: mol_type = other RNA
cccaaaggaggcttacaac

SEQ ID NO: 4642 - RNA, 19 nt, synthetic construct
  source 1..19: mol_type = other RNA
tgttgtgctatggggggac

SEQ ID NO: 4643 - RNA, 19 nt, synthetic construct
  source 1..19: mol_type = other RNA
gggaacacacccccttggc

SEQ ID NO: 4644 - RNA, 19 nt, synthetic construct
  source 1..19: mol_type = other RNA
ttccaaattgatgggtggc

SEQ ID NO: 4645 - RNA, 19 nt, synthetic construct
  source 1..19: mol_type = other RNA
accggcagcatcgacatgc

SEQ ID NO: 4646 - RNA, 19 nt, synthetic construct
  source 1..19: mol_type = other RNA
ctggcttgcggcgcgaggc

SEQ ID NO: 4647 - RNA, 19 nt, synthetic construct
  source 1..19: mol_type = other RNA
gtgtaagatagttaacatc

SEQ ID NO: 4648 - RNA, 19 nt, synthetic construct
  source 1..19: mol_type = other RNA
aggattaggactgaagcgc

SEQ ID NO: 4649 - RNA, 19 nt, synthetic construct
  source 1..19: mol_type = other RNA
aatgtgtaagatagttaac

SEQ ID NO: 4650 - RNA, 19 nt, synthetic construct
  source 1..19: mol_type = other RNA
ggccagcctaagatcatgc

SEQ ID NO: 4651 - RNA, 19 nt, synthetic construct
  source 1..19: mol_type = other RNA
agttccatttaaattgacc

SEQ ID NO: 4652 - RNA, 19 nt, synthetic construct
  source 1..19: mol_type = other RNA
tccatttaaattgacttcc

SEQ ID NO: 4653 - RNA, 19 nt, synthetic construct
  source 1..19: mol_type = other RNA
cccaccctcacgaggtgtc

SEQ ID NO: 4654 - RNA, 19 nt, synthetic construct
  source 1..19: mol_type = other RNA
catcttagcttagctttcc

SEQ ID NO: 4655 - RNA, 19 nt, synthetic construct
  source 1..19: mol_type = other RNA
acttagccccatgagtttc

SEQ ID NO: 4656 - RNA, 19 nt, synthetic construct
  source 1..19: mol_type = other RNA
tcatggtttagggtgatcc

SEQ ID NO: 4657 - RNA, 19 nt, synthetic construct
  source 1..19: mol_type = other RNA
gcctgaagcacaggattac

SEQ ID NO: 4658 - RNA, 19 nt, synthetic construct
  source 1..19: mol_type = other RNA
catactgagggtgaaattc

SEQ ID NO: 4659 - RNA, 19 nt, synthetic construct
  source 1..19: mol_type = other RNA
aagatcatggtttagggtc

SEQ ID NO: 4660 - RNA, 19 nt, synthetic construct
  source 1..19: mol_type = other RNA
gggatctcccccttgtggc

SEQ ID NO: 4661 - RNA, 19 nt, synthetic construct
  source 1..19: mol_type = other RNA
gaggaatgtgtaagatagc

SEQ ID NO: 4662 - RNA, 19 nt, synthetic construct
  source 1..19: mol_type = other RNA
atcatggtttagggtgatc

SEQ ID NO: 4663 - RNA, 19 nt, synthetic construct
  source 1..19: mol_type = other RNA
cagcatcgacatggtagac

SEQ ID NO: 4664 - RNA, 19 nt, synthetic construct
  source 1..19: mol_type = other RNA
ggtgcaggcgtaggaatac

SEQ ID NO: 4665 - RNA, 19 nt, synthetic construct
  source 1..19: mol_type = other RNA
aggaatgtgtaagatagtc

SEQ ID NO: 4666 - RNA, 19 nt, synthetic construct
  source 1..19: mol_type = other RNA
catggtttagggtgatcac

SEQ ID NO: 4667 - RNA, 19 nt, synthetic construct
  source 1..19: mol_type = other RNA
tccacccaagtcgccgtcc

SEQ ID NO: 4668 - RNA, 19 nt, synthetic construct
  source 1..19: mol_type = other RNA
tcagtaatgaccctggttc

SEQ ID NO: 4669 - RNA, 19 nt, synthetic construct
  source 1..19: mol_type = other RNA
ctgggactttagggctaac

SEQ ID NO: 4670 - RNA, 19 nt, synthetic construct
  source 1..19: mol_type = other RNA
caggcgtaggaatatggac

SEQ ID NO: 4671 - RNA, 19 nt, synthetic construct
  source 1..19: mol_type = other RNA
gcaggcgtaggaatatggc

SEQ ID NO: 4672 - RNA, 19 nt, synthetic construct
  source 1..19: mol_type = other RNA
agccacgaggtcggggcgc

SEQ ID NO: 4673 - RNA, 19 nt, synthetic construct
  source 1..19: mol_type = other RNA
aatcatgcctccctaagac

SEQ ID NO: 4674 - RNA, 19 nt, synthetic construct
  source 1..19: mol_type = other RNA
taagccgttggcacctctc

SEQ ID NO: 4675 - RNA, 19 nt, synthetic construct
  source 1..19: mol_type = other RNA
atcgacatggtagactcgc

SEQ ID NO: 4676 - RNA, 19 nt, synthetic construct
  source 1..19: mol_type = other RNA
tcttcggtaattctgaggc

SEQ ID NO: 4677 - RNA, 19 nt, synthetic construct
  source 1..19: mol_type = other RNA
aagtcgccagtggtgtctc

SEQ ID NO: 4678 - RNA, 19 nt, synthetic construct
  source 1..19: mol_type = other RNA
ataaattgaaaaggcacgc

SEQ ID NO: 4679 - RNA, 19 nt, synthetic construct
  source 1..19: mol_type = other RNA
gttagaggcccttggggtc

SEQ ID NO: 4680 - RNA, 19 nt, synthetic construct
  source 1..19: mol_type = other RNA
aatcaggggatcgcagcgc

SEQ ID NO: 4681 - RNA, 19 nt, synthetic construct
  source 1..19: mol_type = other RNA
taagatagttaacatgggc

SEQ ID NO: 4682 - RNA, 19 nt, synthetic construct
  source 1..19: mol_type = other RNA
tgtaagatagttaacatgc

SEQ ID NO: 4683 - RNA, 19 nt, synthetic construct
  source 1..19: mol_type = other RNA
cggccgcctgtccttggtc

SEQ ID NO: 4684 - RNA, 19 nt, synthetic construct
  source 1..19: mol_type = other RNA
ttagaggcccttggggttc

SEQ ID NO: 4685 - RNA, 19 nt, synthetic construct
  source 1..19: mol_type = other RNA
gggatcgcagcggctacac

SEQ ID NO: 4686 - RNA, 19 nt, synthetic construct
  source 1..19: mol_type = other RNA
cacgaggtcggggcgaggc

SEQ ID NO: 4687 - RNA, 19 nt, synthetic construct
  source 1..19: mol_type = other RNA
tgaagtcccgagccaaagc

SEQ ID NO: 4688 - RNA, 19 nt, synthetic construct
  source 1..19: mol_type = other RNA
tggcgagtctaccatgtcg

SEQ ID NO: 4689 - RNA, 19 nt, synthetic construct
  source 1..19: mol_type = other RNA
ttaaccgaactgcgaggag

SEQ ID NO: 4690 - RNA, 19 nt, synthetic construct
  source 1..19: mol_type = other RNA
taagtcccgagccaaagcc

SEQ ID NO: 4691 - RNA, 19 nt, synthetic construct
  source 1..19: mol_type = other RNA
tagtctaccatgtcgatgc

SEQ ID NO: 4692 - RNA, 19 nt, synthetic construct
  source 1..19: mol_type = other RNA
taccgaactgcgaggagca

SEQ ID NO: 4693 - RNA, 19 nt, synthetic construct
  source 1..19: mol_type = other RNA
taagacggcgacttgggtg

SEQ ID NO: 4694 - RNA, 19 nt, synthetic construct
  source 1..19: mol_type = other RNA
tattaaccgaactgcgagg

SEQ ID NO: 4695 - RNA, 19 nt, synthetic construct
  source 1..19: mol_type = other RNA
tttaaccgaactgcgagga

SEQ ID NO: 4696 - RNA, 19 nt, synthetic construct
  source 1..19: mol_type = other RNA
ttctcgcggaaggtcagct

SEQ ID NO: 4697 - RNA, 19 nt, synthetic construct
  source 1..19: mol_type = other RNA
tttgtcatcgcttccagtc

SEQ ID NO: 4698 - RNA, 19 nt, synthetic construct
  source 1..19: mol_type = other RNA
tttactgaccatgcgagct

SEQ ID NO: 4699 - RNA, 19 nt, synthetic construct
  source 1..19: mol_type = other RNA
ttcaactggtttgtagact

SEQ ID NO: 4700 - RNA, 19 nt, synthetic construct
  source 1..19: mol_type = other RNA
taaccgaactgcgaggagc

SEQ ID NO: 4701 - RNA, 19 nt, synthetic construct
  source 1..19: mol_type = other RNA
tttggcgttctcgcggaag

SEQ ID NO: 4702 - RNA, 19 nt, synthetic construct
  source 1..19: mol_type = other RNA
ttactcccatcactgattt

SEQ ID NO: 4703 - RNA, 19 nt, synthetic construct
  source 1..19: mol_type = other RNA
tttggcggaagacggcgac

SEQ ID NO: 4704 - RNA, 19 nt, synthetic construct
  source 1..19: mol_type = other RNA
tcgatcttcgttttaccat

SEQ ID NO: 4705 - RNA, 19 nt, synthetic construct
  source 1..19: mol_type = other RNA
tcggtgtggcgatcttcgt

SEQ ID NO: 4706 - RNA, 19 nt, synthetic construct
  source 1..19: mol_type = other RNA
tccaattaaccgaactgcg

SEQ ID NO: 4707 - RNA, 19 nt, synthetic construct
  source 1..19: mol_type = other RNA
tgcgacttgggtggagtac

SEQ ID NO: 4708 - RNA, 19 nt, synthetic construct
  source 1..19: mol_type = other RNA
ttcccgagccaaagccgag

SEQ ID NO: 4709 - RNA, 19 nt, synthetic construct
  source 1..19: mol_type = other RNA
tattgaccgccccaggggc

SEQ ID NO: 4710 - RNA, 19 nt, synthetic construct
  source 1..19: mol_type = other RNA
taattaaccgaactgcgag

SEQ ID NO: 4711 - RNA, 19 nt, synthetic construct
  source 1..19: mol_type = other RNA
tcttggcggaagacggcga

SEQ ID NO: 4712 - RNA, 19 nt, synthetic construct
  source 1..19: mol_type = other RNA
tatcgcttccagtcccgtc

SEQ ID NO: 4713 - RNA, 19 nt, synthetic construct
  source 1..19: mol_type = other RNA
tgcgatcttcgttttacca

SEQ ID NO: 4714 - RNA, 19 nt, synthetic construct
  source 1..19: mol_type = other RNA
ttggcgatcttcgttttac

SEQ ID NO: 4715 - RNA, 19 nt, synthetic construct
  source 1..19: mol_type = other RNA
tggacgtgggtgatattgt

SEQ ID NO: 4716 - RNA, 19 nt, synthetic construct
  source 1..19: mol_type = other RNA
ttggcgttctcgcggaagg

SEQ ID NO: 4717 - RNA, 19 nt, synthetic construct
  source 1..19: mol_type = other RNA
tgttttaccatcagccccc

SEQ ID NO: 4718 - RNA, 19 nt, synthetic construct
  source 1..19: mol_type = other RNA
tctcttggcggaagacggc

SEQ ID NO: 4719 - RNA, 19 nt, synthetic construct
  source 1..19: mol_type = other RNA
tatgtcgatgctgccggtg

SEQ ID NO: 4720 - RNA, 19 nt, synthetic construct
  source 1..19: mol_type = other RNA
ttcccgtctttgcttttac

SEQ ID NO: 4721 - RNA, 19 nt, synthetic construct
  source 1..19: mol_type = other RNA
tagggtgggttagaaacct

SEQ ID NO: 4722 - RNA, 19 nt, synthetic construct
  source 1..19: mol_type = other RNA
ttttggcgttctcgcggaa

SEQ ID NO: 4723 - RNA, 19 nt, synthetic construct
  source 1..19: mol_type = other RNA
tgcgttctcgcggaaggtc

SEQ ID NO: 4724 - RNA, 19 nt, synthetic construct
  source 1..19: mol_type = other RNA
ttcgtcagctagcgtggcg

SEQ ID NO: 4725 - RNA, 19 nt, synthetic construct
  source 1..19: mol_type = other RNA
ttagatgggacacgcaggt

SEQ ID NO: 4726 - RNA, 19 nt, synthetic construct
  source 1..19: mol_type = other RNA
ttagcgtggcgagctgggg

SEQ ID NO: 4727 - RNA, 19 nt, synthetic construct
  source 1..19: mol_type = other RNA
ttcgtcacagctgaacggc

SEQ ID NO: 4728 - RNA, 19 nt, synthetic construct
  source 1..19: mol_type = other RNA
tcttcgttttaccatcagc

SEQ ID NO: 4729 - RNA, 19 nt, synthetic construct
  source 1..19: mol_type = other RNA
tgggtgagagacacctcgt

SEQ ID NO: 4730 - RNA, 19 nt, synthetic construct
  source 1..19: mol_type = other RNA
tatgatcttaggctggccc

SEQ ID NO: 4731 - RNA, 19 nt, synthetic construct
  source 1..19: mol_type = other RNA
ttcgtgagggtgggttaga

SEQ ID NO: 4732 - RNA, 19 nt, synthetic construct
  source 1..19: mol_type = other RNA
tgggttagaaacctcttta

SEQ ID NO: 4733 - RNA, 19 nt, synthetic construct
  source 1..19: mol_type = other RNA
tagtctattaggaggtgag

SEQ ID NO: 4734 - RNA, 19 nt, synthetic construct
  source 1..19: mol_type = other RNA
tccggcatacagtatatcc

SEQ ID NO: 4735 - RNA, 19 nt, synthetic construct
  source 1..19: mol_type = other RNA
tagacacctcgtgagggtg

SEQ ID NO: 4736 - RNA, 19 nt, synthetic construct
  source 1..19: mol_type = other RNA
tacctcgtcagctagcgtg

SEQ ID NO: 4737 - RNA, 19 nt, synthetic construct
  source 1..19: mol_type = other RNA
taccgaagaaatcatggga

SEQ ID NO: 4738 - RNA, 19 nt, synthetic construct
  source 1..19: mol_type = other RNA
taatccaactacaactcaa

SEQ ID NO: 4739 - RNA, 19 nt, synthetic construct
  source 1..19: mol_type = other RNA
ttgtagatgggacacgcag

SEQ ID NO: 4740 - RNA, 19 nt, synthetic construct
  source 1..19: mol_type = other RNA
tatccaactacaactcaac

SEQ ID NO: 4741 - RNA, 19 nt, synthetic construct
  source 1..19: mol_type = other RNA
tatatctctaaccaccacc

SEQ ID NO: 4742 - RNA, 19 nt, synthetic construct
  source 1..19: mol_type = other RNA
tgtatatcctatctagccc

SEQ ID NO: 4743 - RNA, 19 nt, synthetic construct
  source 1..19: mol_type = other RNA
tggtttttgctggaatcct

SEQ ID NO: 4744 - RNA, 19 nt, synthetic construct
  source 1..19: mol_type = other RNA
tttgaccgccccaggggcc

SEQ ID NO: 4745 - RNA, 19 nt, synthetic construct
  source 1..19: mol_type = other RNA
tatcgcttcagtcctaatc

SEQ ID NO: 4746 - RNA, 19 nt, synthetic construct
  source 1..19: mol_type = other RNA
tcctttcaaaacttgggag

SEQ ID NO: 4747 - RNA, 19 nt, synthetic construct
  source 1..19: mol_type = other RNA
tgccgcaagccagaccagc

SEQ ID NO: 4748 - RNA, 19 nt, synthetic construct
  source 1..19: mol_type = other RNA
tcagttggatgagtggaac

SEQ ID NO: 4749 - RNA, 19 nt, synthetic construct
  source 1..19: mol_type = other RNA
ttaagtctattaggaggtg

SEQ ID NO: 4750 - RNA, 19 nt, synthetic construct
  source 1..19: mol_type = other RNA
tcgtgagggtgggttagaa

SEQ ID NO: 4751 - RNA, 19 nt, synthetic construct
  source 1..19: mol_type = other RNA
taggcatgattgtgggctt

SEQ ID NO: 4752 - RNA, 19 nt, synthetic construct
  source 1..19: mol_type = other RNA
tggcgttctcgcggaaggt

SEQ ID NO: 4753 - RNA, 19 nt, synthetic construct
  source 1..19: mol_type = other RNA
tttgggtcacgtgaccagc

SEQ ID NO: 4754 - RNA, 19 nt, synthetic construct
  source 1..19: mol_type = other RNA
tcctcgtgagggtgggtta

SEQ ID NO: 4755 - RNA, 19 nt, synthetic construct
  source 1..19: mol_type = other RNA
ttgatgcaggagttgtaag

SEQ ID NO: 4756 - RNA, 19 nt, synthetic construct
  source 1..19: mol_type = other RNA
tgttagccctaaagtccca

SEQ ID NO: 4757 - RNA, 19 nt, synthetic construct
  source 1..19: mol_type = other RNA
tacatcgtctgcctgtggc

SEQ ID NO: 4758 - RNA, 19 nt, synthetic construct
  source 1..19: mol_type = other RNA
tggacgtctcccaagaggc

SEQ ID NO: 4759 - RNA, 19 nt, synthetic construct
  source 1..19: mol_type = other RNA
tatgaggggggcatatctc

SEQ ID NO: 4760 - RNA, 19 nt, synthetic construct
  source 1..19: mol_type = other RNA
tgcctttcaaaacttggga

SEQ ID NO: 4761 - RNA, 19 nt, synthetic construct
  source 1..19: mol_type = other RNA
tttaatcagagtaataact

SEQ ID NO: 4762 - RNA, 19 nt, synthetic construct
  source 1..19: mol_type = other RNA
tagtaatgaggggggcata

SEQ ID NO: 4763 - RNA, 19 nt, synthetic construct
  source 1..19: mol_type = other RNA
ttgcgatcccctgattttg

SEQ ID NO: 4764 - RNA, 19 nt, synthetic construct
  source 1..19: mol_type = other RNA
ttctccgccccgtggtctg

SEQ ID NO: 4765 - RNA, 19 nt, synthetic construct
  source 1..19: mol_type = other RNA
tctatctagcccacccaag

SEQ ID NO: 4766 - RNA, 19 nt, synthetic construct
  source 1..19: mol_type = other RNA
tgtcagctagcgtggcgag

SEQ ID NO: 4767 - RNA, 19 nt, synthetic construct
  source 1..19: mol_type = other RNA
ttccaactacaactcaaca

SEQ ID NO: 4768 - RNA, 19 nt, synthetic construct
  source 1..19: mol_type = other RNA
tgggcaacatctatgtata

SEQ ID NO: 4769 - RNA, 19 nt, synthetic construct
  source 1..19: mol_type = other RNA
tacctcgtgagggtgggtt

SEQ ID NO: 4770 - RNA, 19 nt, synthetic construct
  source 1..19: mol_type = other RNA
tgaaatagtcctgctcaac

SEQ ID NO: 4771 - RNA, 19 nt, synthetic construct
  source 1..19: mol_type = other RNA
tcctcgtcagctagcgtgg

SEQ ID NO: 4772 - RNA, 19 nt, synthetic construct
  source 1..19: mol_type = other RNA
tggctaagtctattaggag

SEQ ID NO: 4773 - RNA, 19 nt, synthetic construct
  source 1..19: mol_type = other RNA
tagaattaccgaagaaatc

SEQ ID NO: 4774 - RNA, 19 nt, synthetic construct
  source 1..19: mol_type = other RNA
tgtaagcctcctttgggac

SEQ ID NO: 4775 - RNA, 19 nt, synthetic construct
  source 1..19: mol_type = other RNA
tggcatatctctaaccacc

SEQ ID NO: 4776 - RNA, 19 nt, synthetic construct
  source 1..19: mol_type = other RNA
tagtatatcctatctagcc

SEQ ID NO: 4777 - RNA, 19 nt, synthetic construct
  source 1..19: mol_type = other RNA
tatagtcactctggtgaat

SEQ ID NO: 4778 - RNA, 19 nt, synthetic construct
  source 1..19: mol_type = other RNA
tgccggcatacagtatatc

SEQ ID NO: 4779 - RNA, 19 nt, synthetic construct
  source 1..19: mol_type = other RNA
tccaatccctgctgtggtc

SEQ ID NO: 4780 - RNA, 19 nt, synthetic construct
  source 1..19: mol_type = other RNA
tatcgtctgcctgtggctc

SEQ ID NO: 4781 - RNA, 19 nt, synthetic construct
  source 1..19: mol_type = other RNA
tagacacctcgtcagctag

SEQ ID NO: 4782 - RNA, 19 nt, synthetic construct
  source 1..19: mol_type = other RNA
ttttaccatcagccccctt

SEQ ID NO: 4783 - RNA, 19 nt, synthetic construct
  source 1..19: mol_type = other RNA
tccgctgcgatcccctgat

SEQ ID NO: 4784 - RNA, 19 nt, synthetic construct
  source 1..19: mol_type = other RNA
tctagcgtggcgagctggg

SEQ ID NO: 4785 - RNA, 19 nt, synthetic construct
  source 1..19: mol_type = other RNA
tcttcgtcacagctgaacg

SEQ ID NO: 4786 - RNA, 19 nt, synthetic construct
  source 1..19: mol_type = other RNA
ttcatgggacttgcaagtg

SEQ ID NO: 4787 - RNA, 19 nt, synthetic construct
  source 1..19: mol_type = other RNA
ttatatcctatctagccca

SEQ ID NO: 4788 - RNA, 19 nt, synthetic construct
  source 1..19: mol_type = other RNA
tggtgaatccaagcataaa

SEQ ID NO: 4789 - RNA, 19 nt, synthetic construct
  source 1..19: mol_type = other RNA
tgcgatcccctgattttgg

SEQ ID NO: 4790 - RNA, 19 nt, synthetic construct
  source 1..19: mol_type = other RNA
tttcgtcacagctgaacgg

SEQ ID NO: 4791 - RNA, 19 nt, synthetic construct
  source 1..19: mol_type = other RNA
tgaaatgttggatgtggcc

SEQ ID NO: 4792 - RNA, 19 nt, synthetic construct
  source 1..19: mol_type = other RNA
taatggaactattgataaa

SEQ ID NO: 4793 - RNA, 19 nt, synthetic construct
  source 1..19: mol_type = other RNA
tttgtacacgatctccgcc

SEQ ID NO: 4794 - RNA, 19 nt, synthetic construct
  source 1..19: mol_type = other RNA
tcgtcagctagcgtggcga

SEQ ID NO: 4795 - RNA, 19 nt, synthetic construct
  source 1..19: mol_type = other RNA
ttcgcgccgcaagccagac

SEQ ID NO: 4796 - RNA, 19 nt, synthetic construct
  source 1..19: mol_type = other RNA
tctaagtctattaggaggt

SEQ ID NO: 4797 - RNA, 19 nt, synthetic construct
  source 1..19: mol_type = other RNA
taggtctgtagatgggaca

SEQ ID NO: 4798 - RNA, 19 nt, synthetic construct
  source 1..19: mol_type = other RNA
tccaccctcagaattaccg

SEQ ID NO: 4799 - RNA, 19 nt, synthetic construct
  source 1..19: mol_type = other RNA
ttcagaattaccgaagaaa

SEQ ID NO: 4800 - RNA, 19 nt, synthetic construct
  source 1..19: mol_type = other RNA
ttacaactcaacagggtgc

SEQ ID NO: 4801 - RNA, 19 nt, synthetic construct
  source 1..19: mol_type = other RNA
tagccggcatacagtatat

SEQ ID NO: 4802 - RNA, 19 nt, synthetic construct
  source 1..19: mol_type = other RNA
ttgtacccaaaccagaagt

SEQ ID NO: 4803 - RNA, 19 nt, synthetic construct
  source 1..19: mol_type = other RNA
tgtcctaatcctgtgcttc

SEQ ID NO: 4804 - RNA, 19 nt, synthetic construct
  source 1..19: mol_type = other RNA
tgcttaggacccctgaaag

SEQ ID NO: 4805 - RNA, 19 nt, synthetic construct
  source 1..19: mol_type = other RNA
ttaatgaggggggcatatc

SEQ ID NO: 4806 - RNA, 19 nt, synthetic construct
  source 1..19: mol_type = other RNA
tgctgaacggcctccttag

SEQ ID NO: 4807 - RNA, 19 nt, synthetic construct
  source 1..19: mol_type = other RNA
ttccaagggggtgtgttcc

SEQ ID NO: 4808 - RNA, 19 nt, synthetic construct
  source 1..19: mol_type = other RNA
tcatgattgtgggcttagg

SEQ ID NO: 4809 - RNA, 19 nt, synthetic construct
  source 1..19: mol_type = other RNA
taaacttgggaggccccag

SEQ ID NO: 4810 - RNA, 19 nt, synthetic construct
  source 1..19: mol_type = other RNA
tgggtgcaagtgggggaca

SEQ ID NO: 4811 - RNA, 19 nt, synthetic construct
  source 1..19: mol_type = other RNA
ttaatcagagtaataactt

SEQ ID NO: 4812 - RNA, 19 nt, synthetic construct
  source 1..19: mol_type = other RNA
tcatggggctaagtctatt

SEQ ID NO: 4813 - RNA, 19 nt, synthetic construct
  source 1..19: mol_type = other RNA
tcaaccagggtcattactg

SEQ ID NO: 4814 - RNA, 19 nt, synthetic construct
  source 1..19: mol_type = other RNA
ttatcttacacattcctcc

SEQ ID NO: 4815 - RNA, 19 nt, synthetic construct
  source 1..19: mol_type = other RNA
tcttagggaggcatgattg

SEQ ID NO: 4816 - RNA, 19 nt, synthetic construct
  source 1..19: mol_type = other RNA
tcccagttggatgagtgga

SEQ ID NO: 4817 - RNA, 19 nt, synthetic construct
  source 1..19: mol_type = other RNA
tattcctacgcctgcacct

SEQ ID NO: 4818 - RNA, 19 nt, synthetic construct
  source 1..19: mol_type = other RNA
tcatacagtatatcctatc

SEQ ID NO: 4819 - RNA, 19 nt, synthetic construct
  source 1..19: mol_type = other RNA
tatgattgtgggcttagga

SEQ ID NO: 4820 - RNA, 19 nt, synthetic construct
  source 1..19: mol_type = other RNA
tcgtcacagctgaacggcc

SEQ ID NO: 4821 - RNA, 19 nt, synthetic construct
  source 1..19: mol_type = other RNA
taaatgttggatgtggcca

SEQ ID NO: 4822 - RNA, 19 nt, synthetic construct
  source 1..19: mol_type = other RNA
tgccagaaatagtcctgct

SEQ ID NO: 4823 - RNA, 19 nt, synthetic construct
  source 1..19: mol_type = other RNA
tgcaaccagatgtccatat

SEQ ID NO: 4824 - RNA, 19 nt, synthetic construct
  source 1..19: mol_type = other RNA
tacaagctagggtgcaagt

SEQ ID NO: 4825 - RNA, 19 nt, synthetic construct
  source 1..19: mol_type = other RNA
tggttagaaacctctttac

SEQ ID NO: 4826 - RNA, 19 nt, synthetic construct
  source 1..19: mol_type = other RNA
tctattgataaagtgagtc

SEQ ID NO: 4827 - RNA, 19 nt, synthetic construct
  source 1..19: mol_type = other RNA
ttaaagtgagtcagcagct

SEQ ID NO: 4828 - RNA, 19 nt, synthetic construct
  source 1..19: mol_type = other RNA
tgtgcccagggtaaccctt

SEQ ID NO: 4829 - RNA, 19 nt, synthetic construct
  source 1..19: mol_type = other RNA
tgttagaaacctctttaca

SEQ ID NO: 4830 - RNA, 19 nt, synthetic construct
  source 1..19: mol_type = other RNA
ttcctcgcgccgcaagcca

SEQ ID NO: 4831 - RNA, 19 nt, synthetic construct
  source 1..19: mol_type = other RNA
tctcgtcagctagcgtggc

SEQ ID NO: 4832 - RNA, 19 nt, synthetic construct
  source 1..19: mol_type = other RNA
tttgtaagcctcctttggg

SEQ ID NO: 4833 - RNA, 19 nt, synthetic construct
  source 1..19: mol_type = other RNA
ttccccccatagcacaaca

SEQ ID NO: 4834 - RNA, 19 nt, synthetic construct
  source 1..19: mol_type = other RNA
tccaagggggtgtgttccc

SEQ ID NO: 4835 - RNA, 19 nt, synthetic construct
  source 1..19: mol_type = other RNA
tccacccatcaatttggaa

SEQ ID NO: 4836 - RNA, 19 nt, synthetic construct
  source 1..19: mol_type = other RNA
tcatgtcgatgctgccggt

SEQ ID NO: 4837 - RNA, 19 nt, synthetic construct
  source 1..19: mol_type = other RNA
tcctcgcgccgcaagccag

SEQ ID NO: 4838 - RNA, 19 nt, synthetic construct
  source 1..19: mol_type = other RNA
tatgttaactatcttacac

SEQ ID NO: 4839 - RNA, 19 nt, synthetic construct
  source 1..19: mol_type = other RNA
tcgcttcagtcctaatcct

SEQ ID NO: 4840 - RNA, 19 nt, synthetic construct
  source 1..19: mol_type = other RNA
tttaactatcttacacatt

SEQ ID NO: 4841 - RNA, 19 nt, synthetic construct
  source 1..19: mol_type = other RNA
tcatgatcttaggctggcc

SEQ ID NO: 4842 - RNA, 19 nt, synthetic construct
  source 1..19: mol_type = other RNA
tgtcaatttaaatggaact

SEQ ID NO: 4843 - RNA, 19 nt, synthetic construct
  source 1..19: mol_type = other RNA
tgaagtcaatttaaatgga

SEQ ID NO: 4844 - RNA, 19 nt, synthetic construct
  source 1..19: mol_type = other RNA
tacacctcgtgagggtggg

SEQ ID NO: 4845 - RNA, 19 nt, synthetic construct
  source 1..19: mol_type = other RNA
tgaaagctaagctaagatg

SEQ ID NO: 4846 - RNA, 19 nt, synthetic construct
  source 1..19: mol_type = other RNA
taaactcatggggctaagt

SEQ ID NO: 4847 - RNA, 19 nt, synthetic construct
  source 1..19: mol_type = other RNA
tgatcaccctaaaccatga

SEQ ID NO: 4848 - RNA, 19 nt, synthetic construct
  source 1..19: mol_type = other RNA
ttaatcctgtgcttcaggc

SEQ ID NO: 4849 - RNA, 19 nt, synthetic construct
  source 1..19: mol_type = other RNA
taatttcaccctcagtatg

SEQ ID NO: 4850 - RNA, 19 nt, synthetic construct
  source 1..19: mol_type = other RNA
taccctaaaccatgatctt

SEQ ID NO: 4851 - RNA, 19 nt, synthetic construct
  source 1..19: mol_type = other RNA
tccacaagggggagatccc

SEQ ID NO: 4852 - RNA, 19 nt, synthetic construct
  source 1..19: mol_type = other RNA
tctatcttacacattcctc

SEQ ID NO: 4853 - RNA, 19 nt, synthetic construct
  source 1..19: mol_type = other RNA
tatcaccctaaaccatgat

SEQ ID NO: 4854 - RNA, 19 nt, synthetic construct
  source 1..19: mol_type = other RNA
ttctaccatgtcgatgctg

SEQ ID NO: 4855 - RNA, 19 nt, synthetic construct
  source 1..19: mol_type = other RNA
ttattcctacgcctgcacc

SEQ ID NO: 4856 - RNA, 19 nt, synthetic construct
  source 1..19: mol_type = other RNA
tactatcttacacattcct

SEQ ID NO: 4857 - RNA, 19 nt, synthetic construct
  source 1..19: mol_type = other RNA
ttgatcaccctaaaccatg

SEQ ID NO: 4858 - RNA, 19 nt, synthetic construct
  source 1..19: mol_type = other RNA
tgacggcgacttgggtgga

SEQ ID NO: 4859 - RNA, 19 nt, synthetic construct
  source 1..19: mol_type = other RNA
taaccagggtcattactga

SEQ ID NO: 4860 - RNA, 19 nt, synthetic construct
  source 1..19: mol_type = other RNA
tttagccctaaagtcccag

SEQ ID NO: 4861 - RNA, 19 nt, synthetic construct
  source 1..19: mol_type = other RNA
ttccatattcctacgcctg

SEQ ID NO: 4862 - RNA, 19 nt, synthetic construct
  source 1..19: mol_type = other RNA
tccatattcctacgcctgc

SEQ ID NO: 4863 - RNA, 19 nt, synthetic construct
  source 1..19: mol_type = other RNA
tcgccccgacctcgtggct

SEQ ID NO: 4864 - RNA, 19 nt, synthetic construct
  source 1..19: mol_type = other RNA
ttcttagggaggcatgatt

SEQ ID NO: 4865 - RNA, 19 nt, synthetic construct
  source 1..19: mol_type = other RNA
tagaggtgccaacggctta

SEQ ID NO: 4866 - RNA, 19 nt, synthetic construct
  source 1..19: mol_type = other RNA
tcgagtctaccatgtcgat

SEQ ID NO: 4867 - RNA, 19 nt, synthetic construct
  source 1..19: mol_type = other RNA
tcctcagaattaccgaaga

SEQ ID NO: 4868 - RNA, 19 nt, synthetic construct
  source 1..19: mol_type = other RNA
tagacaccactggcgactt

SEQ ID NO: 4869 - RNA, 19 nt, synthetic construct
  source 1..19: mol_type = other RNA
tcgtgccttttcaatttat

SEQ ID NO: 4870 - RNA, 19 nt, synthetic construct
  source 1..19: mol_type = other RNA
taccccaagggcctctaac

SEQ ID NO: 4871 - RNA, 19 nt, synthetic construct
  source 1..19: mol_type = other RNA
tcgctgcgatcccctgatt

SEQ ID NO: 4872 - RNA, 19 nt, synthetic construct
  source 1..19: mol_type = other RNA
tcccatgttaactatctta

SEQ ID NO: 4873 - RNA, 19 nt, synthetic construct
  source 1..19: mol_type = other RNA
tcatgttaactatcttaca

SEQ ID NO: 4874 - RNA, 19 nt, synthetic construct
  source 1..19: mol_type = other RNA
taccaaggacaggcggccg

SEQ ID NO: 4875 - RNA, 19 nt, synthetic construct
  source 1..19: mol_type = other RNA
taaccccaagggcctctaa

SEQ ID NO: 4876 - RNA, 19 nt, synthetic construct
  source 1..19: mol_type = other RNA
ttgtagccgctgcgatccc

SEQ ID NO: 4877 - RNA, 19 nt, synthetic construct
  source 1..19: mol_type = other RNA
tcctcgccccgacctcgtg

SEQ ID NO: 4878 - RNA, 50 nt, synthetic construct
  source 1..50: mol_type = other RNA
tttatgcctcatcctctgagtgctgaaggcttgctgtaggctgtatgctg

SEQ ID NO: 4879 - RNA, 54 nt, synthetic construct
  source 1..54: mol_type = other RNA
gtgctgggcggggggcggcgggccctcccgcagaacaccatgcgctcttcggaa

SEQ ID NO: 4880 - RNA, 100 nt, synthetic construct
  source 1..100: mol_type = other RNA
gaagcaaagaaggggcagagggagcccgtgagctgagtgggccagggactgggagaaggagtgaggaggcagggccggcatgcctctgctgctggccaga

SEQ ID NO: 4881 - RNA, 54 nt, synthetic construct
  source 1..54: mol_type = other RNA
gtgctgggcggggggcggcgggccctcccgcagaacaccatgcgctcttcggga

SEQ ID NO: 4882 - RNA, 54 nt, synthetic construct
  source 1..54: mol_type = other RNA
gtgctgggcggggggcggcgggccctcccgcagaacaccatgcgctccacggaa

SEQ ID NO: 4883 - RNA, 35 nt, synthetic construct
  source 1..35: mol_type = other RNA
gggccctcccgcagaacaccatgcgctccacggaa

SEQ ID NO: 4884 - RNA, 30 nt, synthetic construct
  source 1..30: mol_type = other RNA
ctcccgcagaacaccatgcgctccacggaa

SEQ ID NO: 4885 - RNA, 55 nt, synthetic construct
  source 1..55: mol_type = other RNA
gtgctgggcggggggcggcgggccctcccgcagaacaccatgcgctccacggaag

SEQ ID NO: 4886 - RNA, 54 nt, synthetic construct
  source 1..54: mol_type = other RNA
gtgctgggcggggggcggcgggccctcccgcagaacaccatgcgctcctcggaa

SEQ ID NO: 4887 - RNA, 10 nt, synthetic construct
  source 1..10: mol_type = other RNA
tgtgacctgg

SEQ ID NO: 4888 - RNA, 10 nt, synthetic construct
  source 1..10: mol_type = other RNA
tgtgatttgg

SEQ ID NO: 4889 - RNA, 10 nt, synthetic construct
  source 1..10: mol_type = other RNA
tataatttgg

SEQ ID NO: 4890 - RNA, 11 nt, synthetic construct
  source 1..11: mol_type = other RNA
cctgacccagt

SEQ ID NO: 4891 - RNA, 18 nt, synthetic construct
  source 1..18: mol_type = other RNA
gtctgcacctgtcactag

SEQ ID NO: 4892 - RNA, 10 nt, synthetic construct
  source 1..10: mol_type = other RNA
gtgacccaag

SEQ ID NO: 4893 - RNA, 15 nt, synthetic construct
  source 1..15: mol_type = other RNA
gtggccactgagaag

SEQ ID NO: 4894 - RNA, 10 nt, synthetic construct
  source 1..10: mol_type = other RNA
gtgacccaat

SEQ ID NO: 4895 - RNA, 10 nt, synthetic construct
  source 1..10: mol_type = other RNA
gtgacccaac

SEQ ID NO: 4896 - RNA, 15 nt, synthetic construct
  source 1..15: mol_type = other RNA
gtggccactgagaaa

SEQ ID NO: 4897 - RNA, 50 nt, synthetic construct
  source 1..50: mol_type = other RNA
agtgtatgatgcctgttactagcattcacatggaacaaattgctgccgtg

SEQ ID NO: 4898 - RNA, 52 nt, synthetic construct
  source 1..52: mol_type = other RNA
ctgaggagcgccttgacagcagccatgggagggccgccccctacctcagtga

SEQ ID NO: 4899 - RNA, 52 nt, synthetic construct
  source 1..52: mol_type = other RNA
ctgtggagcgccttgacagcagccatgggagggccgccccctacctcagtga

SEQ ID NO: 4900 - RNA, 100 nt, synthetic construct
  source 1..100: mol_type = other RNA
tggccgtgtagtgctacccagcgctggctgcctcctcagcattgcaattcctctcccatctgggcaccagtcagctaccctggtgggaatctgggtagcc

SEQ ID NO: 4901 - RNA, 99 nt, synthetic construct
  source 1..99: mol_type = other RNA
ggccgtgtagtgctacccagcgctggctgcctcctcagcattgcaattcctctcccatctgggcaccagtcagctaccctggtgggaatctgggtagcc

SEQ ID NO: 4902 - RNA, 54 nt, synthetic construct
  source 1..54: mol_type = other RNA
tcctgaggagcgccttgacagcagccatgggagggccgccccctacctcagtga

SEQ ID NO: 4903 - RNA, 35 nt, synthetic construct
  source 1..35: mol_type = other RNA
ctgaggagcgccttgacagcagccatgggagggcc

SEQ ID NO: 4904 - RNA, 52 nt, synthetic construct
  source 1..52: mol_type = other RNA
ctgcggagcgccttgacagcagccatgggagggccgccccctacctcagtga

SEQ ID NO: 4905 - DNA, 21 bp, synthetic construct
  source 1..21: mol_type = other DNA
gactggaagcgatgacaatct

SEQ ID NO: 4906 - RNA, 21 nt, synthetic construct
  source 1..21: mol_type = other RNA
gactggaagcgatgacaatct

SEQ ID NO: 4907 - DNA, 21 bp, synthetic construct
  source 1..21: mol_type = other DNA
tttgtcatcgcttccagtctt

SEQ ID NO: 4908 - RNA, 21 nt, synthetic construct
  source 1..21: mol_type = other RNA
tttgtcatcgcttccagtctt

SEQ ID NO: 4909 - DNA, 21 bp, synthetic construct
  source 1..21: mol_type = other DNA
cttccgcgagaacgccaatct

SEQ ID NO: 4910 - RNA, 21 nt, synthetic construct
  source 1..21: mol_type = other RNA
cttccgcgagaacgccaatct

SEQ ID NO: 4911 - DNA, 21 bp, synthetic construct
  source 1..21: mol_type = other DNA
tttggcgttctcgcggaagtt

SEQ ID NO: 4912 - RNA, 21 nt, synthetic construct
  source 1..21: mol_type = other RNA
tttggcgttctcgcggaagtt

SEQ ID NO: 4913 - DNA, 21 bp, synthetic construct
  source 1..21: mol_type = other DNA
gcatcgacatggtagacttct

SEQ ID NO: 4914 - RNA, 21 nt, synthetic construct
  source 1..21: mol_type = other RNA
gcatcgacatggtagacttct

SEQ ID NO: 4915 - DNA, 21 bp, synthetic construct
  source 1..21: mol_type = other DNA
tagtctaccatgtcgatgctt

SEQ ID NO: 4916 - RNA, 21 nt, synthetic construct
  source 1..21: mol_type = other RNA
tagtctaccatgtcgatgctt

SEQ ID NO: 4917 - DNA, 21 bp, synthetic construct
  source 1..21: mol_type = other DNA
gctcctcgcagttcggtttct

SEQ ID NO: 4918 - RNA, 21 nt, synthetic construct
  source 1..21: mol_type = other RNA
gctcctcgcagttcggtttct

SEQ ID NO: 4919 - DNA, 21 bp, synthetic construct
  source 1..21: mol_type = other DNA
taaccgaactgcgaggagctt

SEQ ID NO: 4920 - RNA, 21 nt, synthetic construct
  source 1..21: mol_type = other RNA
taaccgaactgcgaggagctt

SEQ ID NO: 4921 - DNA, 21 bp, synthetic construct
  source 1..21: mol_type = other DNA
ggctttggctcgggactttct

SEQ ID NO: 4922 - RNA, 21 nt, synthetic construct
  source 1..21: mol_type = other RNA
ggctttggctcgggactttct

SEQ ID NO: 4923 - DNA, 21 bp, synthetic construct
  source 1..21: mol_type = other DNA
taagtcccgagccaaagcctt

SEQ ID NO: 4924 - RNA, 21 nt, synthetic construct
  source 1..21: mol_type = other RNA
taagtcccgagccaaagcctt

SEQ ID NO: 4925 - DNA, 21 bp, synthetic construct
  source 1..21: mol_type = other DNA
gactggaagcgatgacaaccc

SEQ ID NO: 4926 - RNA, 21 nt, synthetic construct
  source 1..21: mol_type = other RNA
gactggaagcgatgacaaccc

SEQ ID NO: 4927-4928 - skipped (2 entries)

SEQ ID NO: 4929 - DNA, 21 bp, synthetic construct
  source 1..21: mol_type = other DNA
cttccgcgagaacgccaaccc

SEQ ID NO: 4930 - RNA, 21 nt, synthetic construct
  source 1..21: mol_type = other RNA
cttccgcgagaacgccaaccc

SEQ ID NO: 4931-4932 - skipped (2 entries)

SEQ ID NO: 4933 - DNA, 21 bp, synthetic construct
  source 1..21: mol_type = other DNA
gcatcgacatggtagactccc

SEQ ID NO: 4934 - RNA, 21 nt, synthetic construct
  source 1..21: mol_type = other RNA
gcatcgacatggtagactccc

SEQ ID NO: 4935-4936 - skipped (2 entries)

SEQ ID NO: 4937 - DNA, 21 bp, synthetic construct
  source 1..21: mol_type = other DNA
gctcctcgcagttcggttccc

SEQ ID NO: 4938 - RNA, 21 nt, synthetic construct
  source 1..21: mol_type = other RNA
gctcctcgcagttcggttccc

SEQ ID NO: 4939-4940 - skipped (2 entries)

SEQ ID NO: 4941 - DNA, 21 bp, synthetic construct
  source 1..21: mol_type = other DNA
ggctttggctcgggacttccc

SEQ ID NO: 4942 - RNA, 21 nt, synthetic construct
  source 1..21: mol_type = other RNA
ggctttggctcgggacttccc

SEQ ID NO: 4943-4944 - skipped (2 entries)

SEQ ID NO: 4945 - DNA, 21 bp, synthetic construct
  source 1..21: mol_type = other DNA
gactggaagcgatgacaaacc

SEQ ID NO: 4946 - RNA, 21 nt, synthetic construct
  source 1..21: mol_type = other RNA
gactggaagcgatgacaaacc

SEQ ID NO: 4947-4948 - skipped (2 entries)

SEQ ID NO: 4949 - DNA, 21 bp, synthetic construct
  source 1..21: mol_type = other DNA
cttccgcgagaacgccaaacc

SEQ ID NO: 4950 - RNA, 21 nt, synthetic construct
  source 1..21: mol_type = other RNA
cttccgcgagaacgccaaacc

SEQ ID NO: 4951-4952 - skipped (2 entries)

SEQ ID NO: 4953 - DNA, 21 bp, synthetic construct
  source 1..21: mol_type = other DNA
gcatcgacatggtagactacc

SEQ ID NO: 4954 - RNA, 21 nt, synthetic construct
  source 1..21: mol_type = other RNA
gcatcgacatggtagactacc

SEQ ID NO: 4955-4956 - skipped (2 entries)

SEQ ID NO: 4957 - DNA, 21 bp, synthetic construct
  source 1..21: mol_type = other DNA
gctcctcgcagttcggttgcc

SEQ ID NO: 4958 - RNA, 21 nt, synthetic construct
  source 1..21: mol_type = other RNA
gctcctcgcagttcggttgcc

SEQ ID NO: 4959-4960 - skipped (2 entries)

SEQ ID NO: 4961 - DNA, 21 bp, synthetic construct
  source 1..21: mol_type = other DNA
ggctttggctcgggacttacc

SEQ ID NO: 4962 - RNA, 21 nt, synthetic construct
  source 1..21: mol_type = other RNA
ggctttggctcgggacttacc

SEQ ID NO: 4963-4964 - skipped (2 entries)

SEQ ID NO: 4965 - DNA, 21 bp, synthetic construct
  source 1..21: mol_type = other DNA
gactggaagcgatgacaatcc

SEQ ID NO: 4966 - RNA, 21 nt, synthetic construct
  source 1..21: mol_type = other RNA
gactggaagcgatgacaatcc

SEQ ID NO: 4967-4968 - skipped (2 entries)

SEQ ID NO: 4969 - DNA, 21 bp, synthetic construct
  source 1..21: mol_type = other DNA
cttccgcgagaacgccaatcc

SEQ ID NO: 4970 - RNA, 21 nt, synthetic construct
  source 1..21: mol_type = other RNA
cttccgcgagaacgccaatcc

SEQ ID NO: 4971-4972 - skipped (2 entries)

SEQ ID NO: 4973 - DNA, 21 bp, synthetic construct
  source 1..21: mol_type = other DNA
gcatcgacatggtagacttcc

SEQ ID NO: 4974 - RNA, 21 nt, synthetic construct
  source 1..21: mol_type = other RNA
gcatcgacatggtagacttcc

SEQ ID NO: 4975-4976 - skipped (2 entries)

SEQ ID NO: 4977 - DNA, 21 bp, synthetic construct
  source 1..21: mol_type = other DNA
gctcctcgcagttcggtttcc

SEQ ID NO: 4978 - RNA, 21 nt, synthetic construct
  source 1..21: mol_type = other RNA
gctcctcgcagttcggtttcc

SEQ ID NO: 4979-4980 - skipped (2 entries)

SEQ ID NO: 4981 - DNA, 21 bp, synthetic construct
  source 1..21: mol_type = other DNA
ggctttggctcgggactttcc

SEQ ID NO: 4982 - RNA, 21 nt, synthetic construct
  source 1..21: mol_type = other RNA
ggctttggctcgggactttcc

SEQ ID NO: 4983-4984 - skipped (2 entries)

SEQ ID NO: 4985 - DNA, 21 bp, synthetic construct
  source 1..21: mol_type = other DNA
gactggaagggatgacaaccc

SEQ ID NO: 4986 - RNA, 21 nt, synthetic construct
  source 1..21: mol_type = other RNA
gactggaagggatgacaaccc

SEQ ID NO: 4987-4988 - skipped (2 entries)

SEQ ID NO: 4989 - DNA, 21 bp, synthetic construct
  source 1..21: mol_type = other DNA
cttccgcgacaacgccaaccc

SEQ ID NO: 4990 - RNA, 21 nt, synthetic construct
  source 1..21: mol_type = other RNA
cttccgcgacaacgccaaccc

SEQ ID NO: 4991-4992 - skipped (2 entries)

SEQ ID NO: 4993 - DNA, 21 bp, synthetic construct
  source 1..21: mol_type = other DNA
gcatcgacaaggtagactccc

SEQ ID NO: 4994 - RNA, 21 nt, synthetic construct
  source 1..21: mol_type = other RNA
gcatcgacaaggtagactccc

SEQ ID NO: 4995-4996 - skipped (2 entries)

SEQ ID NO: 4997 - DNA, 21 bp, synthetic construct
  source 1..21: mol_type = other DNA
gctcctcgctgttcggttccc

SEQ ID NO: 4998 - RNA, 21 nt, synthetic construct
  source 1..21: mol_type = other RNA
gctcctcgctgttcggttccc

SEQ ID NO: 4999-5000 - skipped (2 entries)

SEQ ID NO: 5001 - DNA, 21 bp, synthetic construct
  source 1..21: mol_type = other DNA
ggctttggcacgggacttccc

SEQ ID NO: 5002 - RNA, 21 nt, synthetic construct
  source 1..21: mol_type = other RNA
ggctttggcacgggacttccc

SEQ ID NO: 5003-5004 - skipped (2 entries)

SEQ ID NO: 5005 - DNA, 21 bp, synthetic construct
  source 1..21: mol_type = other DNA
gactggaagcgatgacaagcc

SEQ ID NO: 5006 - RNA, 21 nt, synthetic construct
  source 1..21: mol_type = other RNA
gactggaagcgatgacaagcc

SEQ ID NO: 5007-5008 - skipped (2 entries)

SEQ ID NO: 5009 - DNA, 21 bp, synthetic construct
  source 1..21: mol_type = other DNA
cttccgcgagaacgccaagcc

SEQ ID NO: 5010 - RNA, 21 nt, synthetic construct
  source 1..21: mol_type = other RNA
cttccgcgagaacgccaagcc

SEQ ID NO: 5011-5012 - skipped (2 entries)

SEQ ID NO: 5013 - DNA, 21 bp, synthetic construct
  source 1..21: mol_type = other DNA
gcatcgacatggtagactgcc

SEQ ID NO: 5014 - RNA, 21 nt, synthetic construct
  source 1..21: mol_type = other RNA
gcatcgacatggtagactgcc

SEQ ID NO: 5015-5020 - skipped (6 entries)

SEQ ID NO: 5021 - DNA, 21 bp, synthetic construct
  source 1..21: mol_type = other DNA
ggctttggctcgggacttgcc

SEQ ID NO: 5022 - RNA, 21 nt, synthetic construct
  source 1..21: mol_type = other RNA
ggctttggctcgggacttgcc

SEQ ID NO: 5023 - skipped

SEQ ID NO: 5024 - DNA, 6644 bp, Homo sapiens
  source 1..6644: mol_type = genomic DNA
gcagtcaccgccacccaccagctccggcaccaacagcagcgccgctgccaccgcccaccttctgccgccgccaccacagccaccttctcctcctccgctgtcctctcccgtcctcgcctctgtcgactatcaggtgaactttgaaccaggatggctgagccccgccaggagttcgaagtgatggaagatcacgctgggacgtacgggttgggggacaggaaagatcaggggggctacaccatgcaccaagaccaagagggtgacacggacgctggcctgaaagaatctcccctgcagacccccactgaggacggatctgaggaaccgggctctgaaacctctgatgctaagagcactccaacagcggaagatgtgacagcacccttagtggatgagggagctcccggcaagcaggctgccgcgcagccccacacggagatcccagaaggaaccacagctgaagaagcaggcattggagacacccccagcctggaagacgaagctgctggtcacgtgacccaagagcctgaaagtggtaaggtggtccaggaaggcttcctccgagagccaggccccccaggtctgagccaccagctcatgtccggcatgcctggggctcccctcctgcctgagggccccagagaggccacacgccaaccttcggggacaggacctgaggacacagagggcggccgccacgcccctgagctgctcaagcaccagcttctaggagacctgcaccaggaggggccgccgctgaagggggcagggggcaaagagaggccggggagcaaggaggaggtggatgaagaccgcgacgtcgatgagtcctccccccaagactcccctccctccaaggcctccccagcccaagatgggcggcctccccagacagccgccagagaagccaccagcatcccaggcttcccagcggagggtgccatccccctccctgtggatttcctctccaaagtttccacagagatcccagcctcagagcccgacgggcccagtgtagggcgggccaaagggcaggatgcccccctggagttcacgtttcacgtggaaatcacacccaacgtgcagaaggagcaggcgcactcggaggagcatttgggaagggctgcatttccaggggcccctggagaggggccagaggcccggggcccctctttgggagaggacacaaaagaggctgaccttccagagccctctgaaaagcagcctgctgctgctccgcgggggaagcccgtcagccgggtccctcaactcaaagctcgcatggtcagtaaaagcaaagacgggactggaagcgatgacaaaaaagccaagacatccacacgttcctctgctaaaaccttgaaaaataggccttgccttagccccaaacaccccactcctggtagctcagaccctctgatccaaccctccagccctgctgtgtgcccagagccaccttcctctcctaaatacgtctcttctgtcacttcccgaactggcagttctggagcaaaggagatgaaactcaagggggctgatggtaaaacgaagatcgccacaccgcggggagcagcccctccaggccagaagggccaggccaacgccaccaggattccagcaaaaaccccgcccgctccaaagacaccacccagctctgcgactaagcaagtccagagaagaccaccccctgcagggcccagatctgagagaggtgaacctccaaaatcaggggatcgcagcggctacagcagccccggctccccaggcactcccggcagccgctcccgcaccccgtcccttccaaccccacccacccgggagcccaagaaggtggcagtggtccgtactccacccaagtcgccgtcttccgccaagagccgcctgcagacagcccccgtgcccatgccagacctgaagaatgtcaagtccaagatcggctccactgagaacctgaagcaccagccgggaggcgggaaggtgcagataattaataagaagctggatcttagcaacgtccagtccaagtgtggctcaaaggataatatcaaacacgtcccgggaggcggcagtgtgcaaatagtctacaaaccagttgacctgagcaaggtgacctccaagtgtggctcattaggcaacatccatcataaaccaggaggtggccaggtggaagtaaaatctgagaagcttgacttcaaggacagagtccagtcgaagattgggtccctggacaatatcacccacgtccctggcggaggaaataaaaagattgaaacccacaagctgaccttccgcgagaacgccaaagccaagacagaccacggggcggagatcgtgtacaagtcgccagtggtgtctggggacacgtctccacggcatctcagcaatgtctcctccaccggcagcatcgacatggtagactcgccccagctcgccacgctagctgacgaggtgtctgcctccctggccaagcagggtttgtgatcaggcccctggggcggtcaataattgtggagaggagagaatgagagagtgtggaaaaaaaaagaataatgacccggcccccgccctctgcccccagctgctcctcgcagttcggttaattggttaatcacttaacctgcttttgtcactcggctttggctcgggacttcaaaatcagtgatgggagtaagagcaaatttcatctttccaaattgatgggtgggctagtaataaaatatttaaaaaaaaacattcaaaaacatggccacatccaacatttcctcaggcaattccttttgattcttttttcttccccctccatgtagaagagggagaaggagaggctctgaaagctgcttctgggggatttcaagggactgggggtgccaaccacctctggccctgttgtgggggtgtcacagaggcagtggcagcaacaaaggatttgaaacttggtgtgttcgtggagccacaggcagacgatgtcaaccttgtgtgagtgtgacgggggttggggtggggcgggaggccacgggggaggccgaggcaggggctgggcagaggggagaggaagcacaagaagtgggagtgggagaggaagccacgtgctggagagtagacatccccctccttgccgctgggagagccaaggcctatgccacctgcagcgtctgagcggccgcctgtccttggtggccgggggtgggggcctgctgtgggtcagtgtgccaccctctgcagggcagcctgtgggagaagggacagcgggtaaaaagagaaggcaagctggcaggagggtggcacttcgtggatgacctccttagaaaagactgaccttgatgtcttgagagcgctggcctcttcctccctccctgcagggtagggggcctgagttgaggggcttccctctgctccacagaaaccctgttttattgagttctgaaggttggaactgctgccatgattttggccactttgcagacctgggactttagggctaaccagttctctttgtaaggacttgtgcctcttgggagacgtccacccgtttccaagcctgggccactggcatctctggagtgtgtgggggtctgggaggcaggtcccgagccccctgtccttcccacggccactgcagtcaccccgtctgcgccgctgtgctgttgtctgccgtgagagcccaatcactgcctatacccctcatcacacgtcacaatgtcccgaattcccagcctcaccaccccttctcagtaatgaccctggttggttgcaggaggtacctactccatactgagggtgaaattaagggaaggcaaagtccaggcacaagagtgggaccccagcctctcactctcagttccactcatccaactgggaccctcaccacgaatctcatgatctgattcggttccctgtctcctcctcccgtcacagatgtgagccagggcactgctcagctgtgaccctaggtgtttctgccttgttgacatggagagagccctttcccctgagaaggcctggccccttcctgtgctgagcccacagcagcaggctgggtgtcttggttgtcagtggtggcaccaggatggaagggcaaggcacccagggcaggcccacagtcccgctgtcccccacttgcaccctagcttgtagctgccaacctcccagacagcccagcccgctgctcagctccacatgcatagtatcagccctccacacccgacaaaggggaacacacccccttggaaatggttcttttcccccagtcccagctggaagccatgctgtctgttctgctggagcagctgaacatatacatagatgttgccctgccctccccatctgcaccctgttgagttgtagttggatttgtctgtttatgcttggattcaccagagtgactatgatagtgaaaagaaaaaaaaaaaaaaaaaaggacgcatgtatcttgaaatgcttgtaaagaggtttctaacccaccctcacgaggtgtctctcacccccacactgggactcgtgtggcctgtgtggtgccaccctgctggggcctcccaagttttgaaaggctttcctcagcacctgggacccaacagagaccagcttctagcagctaaggaggccgttcagctgtgacgaaggcctgaagcacaggattaggactgaagcgatgatgtccccttccctacttccccttggggctccctgtgtcagggcacagactaggtcttgtggctggtctggcttgcggcgcgaggatggttctctctggtcatagcccgaagtctcatggcagtcccaaaggaggcttacaactcctgcatcacaagaaaaaggaagccactgccagctggggggatctgcagctcccagaagctccgtgagcctcagccacccctcagactgggttcctctccaagctcgccctctggaggggcagcgcagcctcccaccaagggccctgcgaccacagcagggattgggatgaattgcctgtcctggatctgctctagaggcccaagctgcctgcctgaggaaggatgacttgacaagtcaggagacactgttcccaaagccttgaccagagcacctcagcccgctgaccttgcacaaactccatctgctgccatgagaaaagggaagccgcctttgcaaaacattgctgcctaaagaaactcagcagcctcaggcccaattctgccacttctggtttgggtacagttaaaggcaaccctgagggacttggcagtagaaatccagggcctcccctggggctggcagcttcgtgtgcagctagagctttacctgaaaggaagtctctgggcccagaactctccaccaagagcctccctgccgttcgctgagtcccagcaattctcctaagttgaagggatctgagaaggagaaggaaatgtggggtagatttggtggtggttagagatatgcccccctcattactgccaacagtttcggctgcatttcttcacgcacctcggttcctcttcctgaagttcttgtgccctgctcttcagcaccatgggccttcttatacggaaggctctgggatctcccccttgtggggcaggctcttggggccagcctaagatcatggtttagggtgatcagtgctggcagataaattgaaaaggcacgctggcttgtgatcttaaatgaggacaatccccccagggctgggcactcctcccctcccctcacttctcccacctgcagagccagtgtccttgggtgggctagataggatatactgtatgccggctccttcaagctgctgactcactttatcaatagttccatttaaattgacttcagtggtgagactgtatcctgtttgctattgcttgttgtgctatggggggaggggggaggaatgtgtaagatagttaacatgggcaaagggagatcttggggtgcagcacttaaactgcctcgtaacccttttcatgatttcaaccacatttgctagagggagggagcagccacggagttagaggcccttggggtttctcttttccactgacaggctttcccaggcagctggctagttcattccctccccagccaggtgcaggcgtaggaatatggacatctggttgctttggcctgctgccctctttcaggggtcctaagcccacaatcatgcctccctaagaccttggcatccttccctctaagccgttggcacctctgtgccacctctcacactggctccagacacacagcctgtgcttttggagctgagatcactcgcttcaccctcctcatctttgttctccaagtaaagccacgaggtcggggcgagggcagaggtgatcacctgcgtgtcccatctacagacctgcagcttcataaaacttctgatttctcttcagctttgaaaagggttaccctgggcactggcctagagcctcacctcctaatagacttagccccatgagtttgccatgttgagcaggactatttctggcacttgcaagtcccatgatttcttcggtaattctgagggtggggggagggacatgaaatcatcttagcttagctttctgtctgtgaatgtctatatagtgtattgtgtgttttaacaaatgatttacactgactgttgctgtaaaagtgaatttggaaataaagttattactctgattaaa

SEQ ID NO: 5025 - DNA, 22 bp, synthetic construct
  source 1..22: mol_type = other DNA
atacatacttctttacattcca

SEQ ID NO: 5026 - protein, 4 aa, synthetic construct
AQAQ

SEQ ID NO: 5027 - DNA, 158 bp, synthetic construct
  source 1..158: mol_type = other DNA
gtgctgggcggggggcggcgggccctcccgcagaacaccatgcgctcttcggaacctcgcagttcggttaatccctgtgacctggtattaaccgaactgcgaggttctgaggagcgccttgacagcagccatgggagggccgccccctacctcagtga

SEQ ID NO: 5028 - DNA, 158 bp, synthetic construct
  source 1..158: mol_type = other DNA
gtgctgggcggggggcggcgggccctcccgcagaacaccatgcgctcttcggaagctttggctcgggacttcccctgtgacctggtgaagtcccgagccaaagcttctgaggagcgccttgacagcagccatgggagggccgccccctacctcagtga

SEQ ID NO: 5029 - DNA, 158 bp, synthetic construct
  source 1..158: mol_type = other DNA
gtgctgggcggggggcggcgggccctcccgcagaacaccatgcgctcttcggaaagctgaccttccgcgagaccctgtgacctggttctcgcggaaggtcagctttctgaggagcgccttgacagcagccatgggagggccgccccctacctcagtga

SEQ ID NO: 5030 - DNA, 158 bp, synthetic construct
  source 1..158: mol_type = other DNA
gtgctgggcggggggcggcgggccctcccgcagaacaccatgcgctcttcggaagccgtcttccgccaagagccctgtgacctggtctcttggcggaagacggcttctgaggagcgccttgacagcagccatgggagggccgccccctacctcagtga

SEQ ID NO: 5031 - DNA, 158 bp, synthetic construct
  source 1..158: mol_type = other DNA
gtgctgggcggggggcggcgggccctcccgcagaacaccatgcgctcttcggaacctcgcagttcggttaatacctgtgacctggtattaaccgaactgcgaggttctgaggagcgccttgacagcagccatgggagggccgccccctacctcagtga

SEQ ID NO: 5032 - DNA, 158 bp, synthetic construct
  source 1..158: mol_type = other DNA
gtgctgggcggggggcggcgggccctcccgcagaacaccatgcgctcttcggaagctttggctcgggacttcacctgtgacctggtgaagtcccgagccaaagcttctgaggagcgccttgacagcagccatgggagggccgccccctacctcagtga

SEQ ID NO: 5033 - DNA, 158 bp, synthetic construct
  source 1..158: mol_type = other DNA
gtgctgggcggggggcggcgggccctcccgcagaacaccatgcgctcttcggaaagctgaccttccgcgagaacctgtgacctggttctcgcggaaggtcagctttctgaggagcgccttgacagcagccatgggagggccgccccctacctcagtga

SEQ ID NO: 5034 - DNA, 158 bp, synthetic construct
  source 1..158: mol_type = other DNA
gtgctgggcggggggcggcgggccctcccgcagaacaccatgcgctcttcggaagccgtcttccgccaagagacctgtgacctggtctcttggcggaagacggcttctgaggagcgccttgacagcagccatgggagggccgccccctacctcagtga

SEQ ID NO: 5035 - DNA, 158 bp, synthetic construct
  source 1..158: mol_type = other DNA
gtgctgggcggggggcggcgggccctcccgcagaacaccatgcgctcttcggaacctcgcagttcggttaattcctgtgatttggtattaaccgaactgcgaggttctgaggagcgccttgacagcagccatgggagggccgccccctacctcagtga

SEQ ID NO: 5036 - DNA, 158 bp, synthetic construct
  source 1..158: mol_type = other DNA
gtgctgggcggggggcggcgggccctcccgcagaacaccatgcgctcttcggaagctttggctcgggacttctcctgtgatttggtgaagtcccgagccaaagcttctgaggagcgccttgacagcagccatgggagggccgccccctacctcagtga

SEQ ID NO: 5037 - DNA, 158 bp, synthetic construct
  source 1..158: mol_type = other DNA
gtgctgggcggggggcggcgggccctcccgcagaacaccatgcgctcttcggaaagctgaccttccgcgagatcctgtgatttggttctcgcggaaggtcagctttctgaggagcgccttgacagcagccatgggagggccgccccctacctcagtga

SEQ ID NO: 5038 - DNA, 158 bp, synthetic construct
  source 1..158: mol_type = other DNA
gtgctgggcggggggcggcgggccctcccgcagaacaccatgcgctcttcggaagccgtcttccgccaagagtcctgtgatttggtctcttggcggaagacggcttctgaggagcgccttgacagcagccatgggagggccgccccctacctcagtga

SEQ ID NO: 5039 - DNA, 158 bp, synthetic construct
  source 1..158: mol_type = other DNA
gtgctgggcggggggcggcgggccctcccgcagaacaccatgcgctcttcggaacctcgcagtacggttaatccctgtgacctggtattaaccgaactgcgaggttctgtggagcgccttgacagcagccatgggagggccgccccctacctcagtga

SEQ ID NO: 5040 - DNA, 158 bp, synthetic construct
  source 1..158: mol_type = other DNA
gtgctgggcggggggcggcgggccctcccgcagaacaccatgcgctcttcggaagctttggctggggacttcccctgtgacctggtgaagtcccgagccaaagcttctgtggagcgccttgacagcagccatgggagggccgccccctacctcagtga

SEQ ID NO: 5041 - DNA, 158 bp, synthetic construct
  source 1..158: mol_type = other DNA
gtgctgggcggggggcggcgggccctcccgcagaacaccatgcgctcttcggaaagctgacctaccgcgagaccctgtgacctggttctcgcggaaggtcagctttctgtggagcgccttgacagcagccatgggagggccgccccctacctcagtga

SEQ ID NO: 5042 - DNA, 158 bp, synthetic construct
  source 1..158: mol_type = other DNA
gtgctgggcggggggcggcgggccctcccgcagaacaccatgcgctcttcggaagccgtcttcggccaagagccctgtgacctggtctcttggcggaagacggcttctgtggagcgccttgacagcagccatgggagggccgccccctacctcagtga

SEQ ID NO: 5043 - DNA, 158 bp, synthetic construct
  source 1..158: mol_type = other DNA
gtgctgggcggggggcggcgggccctcccgcagaacaccatgcgctcttcggaacctcgcagttcggttaatgcctgtgacctggtattaaccgaactgcgaggttctgtggagcgccttgacagcagccatgggagggccgccccctacctcagtga

SEQ ID NO: 5044 - DNA, 158 bp, synthetic construct
  source 1..158: mol_type = other DNA
gtgctgggcggggggcggcgggccctcccgcagaacaccatgcgctcttcggaagctttggctcgggacttcgcctgtgacctggtgaagtcccgagccaaagcttctgtggagcgccttgacagcagccatgggagggccgccccctacctcagtga

SEQ ID NO: 5045 - DNA, 158 bp, synthetic construct
  source 1..158: mol_type = other DNA
gtgctgggcggggggcggcgggccctcccgcagaacaccatgcgctcttcggaaagctgaccttccgcgagagcctgtgacctggttctcgcggaaggtcagctttctgtggagcgccttgacagcagccatgggagggccgccccctacctcagtga

SEQ ID NO: 5046 - DNA, 158 bp, synthetic construct
  source 1..158: mol_type = other DNA
gtgctgggcggggggcggcgggccctcccgcagaacaccatgcgctcttcggaagccgtcttccgccaagaggcctgtgacctggtctcttggcggaagacggcttctgtggagcgccttgacagcagccatgggagggccgccccctacctcagtga

SEQ ID NO: 5047 - DNA, 260 bp, synthetic construct
  source 1..260: mol_type = other DNA
gaagcaaagaaggggcagagggagcccgtgagctgagtgggccagggactgggagaaggagtgaggaggcagggccggcatgcctctgctgctggccagacctcgcagttcggttaattctgtctgcacctgtcactagtattaaccgaactgcgaggtttggccgtgtagtgctacccagcgctggctgcctcctcagcattgcaattcctctcccatctgggcaccagtcagctaccctggtgggaatctgggtagcc

SEQ ID NO: 5048 - DNA, 260 bp, synthetic construct
  source 1..260: mol_type = other DNA
gaagcaaagaaggggcagagggagcccgtgagctgagtgggccagggactgggagaaggagtgaggaggcagggccggcatgcctctgctgctggccagagctttggctcgggacttctctgtctgcacctgtcactagtgaagtcccgagccaaagctttggccgtgtagtgctacccagcgctggctgcctcctcagcattgcaattcctctcccatctgggcaccagtcagctaccctggtgggaatctgggtagcc

SEQ ID NO: 5049 - DNA, 260 bp, synthetic construct
  source 1..260: mol_type = other DNA
gaagcaaagaaggggcagagggagcccgtgagctgagtgggccagggactgggagaaggagtgaggaggcagggccggcatgcctctgctgctggccagaagctgaccttccgcgagatctgtctgcacctgtcactagttctcgcggaaggtcagcttttggccgtgtagtgctacccagcgctggctgcctcctcagcattgcaattcctctcccatctgggcaccagtcagctaccctggtgggaatctgggtagcc

SEQ ID NO: 5050 - DNA, 260 bp, synthetic construct
  source 1..260: mol_type = other DNA
gaagcaaagaaggggcagagggagcccgtgagctgagtgggccagggactgggagaaggagtgaggaggcagggccggcatgcctctgctgctggccagagccgtcttccgccaagagtctgtctgcacctgtcactagtctcttggcggaagacggctttggccgtgtagtgctacccagcgctggctgcctcctcagcattgcaattcctctcccatctgggcaccagtcagctaccctggtgggaatctgggtagcc

SEQ ID NO: 5051 - DNA, 19 bp, synthetic construct
  source 1..19: mol_type = other DNA
cctcgcagttcggttaatt

SEQ ID NO: 5052 - RNA, 19 nt, synthetic construct
  source 1..19: mol_type = other RNA
cctcgcagttcggttaatt

SEQ ID NO: 5053 - DNA, 21 bp, synthetic construct
  source 1..21: mol_type = other DNA
cctcgcagttcggttaattct

SEQ ID NO: 5054 - RNA, 21 nt, synthetic construct
  source 1..21: mol_type = other RNA
cctcgcagttcggttaattct

SEQ ID NO: 5055 - DNA, 19 bp, synthetic construct
  source 1..19: mol_type = other DNA
tattaaccgaactgcgagg

SEQ ID NO: 5056 - DNA, 21 bp, synthetic construct
  source 1..21: mol_type = other DNA
tattaaccgaactgcgaggtt

SEQ ID NO: 5057 - RNA, 21 nt, synthetic construct
  source 1..21: mol_type = other RNA
tattaaccgaactgcgaggtt

SEQ ID NO: 5058 - DNA, 19 bp, synthetic construct
  source 1..19: mol_type = other DNA
cctcgcagttcggttaatc

SEQ ID NO: 5059 - DNA, 21 bp, synthetic construct
  source 1..21: mol_type = other DNA
cctcgcagttcggttaatccc

SEQ ID NO: 5060 - RNA, 21 nt, synthetic construct
  source 1..21: mol_type = other RNA
cctcgcagttcggttaatccc

SEQ ID NO: 5061 - DNA, 19 bp, synthetic construct
  source 1..19: mol_type = other DNA
cctcgcagttcggttaata

SEQ ID NO: 5062 - RNA, 19 nt, synthetic construct
  source 1..19: mol_type = other RNA
cctcgcagttcggttaata

SEQ ID NO: 5063 - DNA, 21 bp, synthetic construct
  source 1..21: mol_type = other DNA
cctcgcagttcggttaatacc

SEQ ID NO: 5064 - RNA, 21 nt, synthetic construct
  source 1..21: mol_type = other RNA
cctcgcagttcggttaatacc

SEQ ID NO: 5065 - DNA, 21 bp, synthetic construct
  source 1..21: mol_type = other DNA
cctcgcagttcggttaattcc

SEQ ID NO: 5066 - RNA, 21 nt, synthetic construct
  source 1..21: mol_type = other RNA
cctcgcagttcggttaattcc

SEQ ID NO: 5067 - DNA, 19 bp, synthetic construct
  source 1..19: mol_type = other DNA
cctcgcagtacggttaatc

SEQ ID NO: 5068 - RNA, 19 nt, synthetic construct
  source 1..19: mol_type = other RNA
cctcgcagtacggttaatc

SEQ ID NO: 5069 - DNA, 21 bp, synthetic construct
  source 1..21: mol_type = other DNA
cctcgcagtacggttaatccc

SEQ ID NO: 5070 - RNA, 21 nt, synthetic construct
  source 1..21: mol_type = other RNA
cctcgcagtacggttaatccc

SEQ ID NO: 5071 - DNA, 19 bp, synthetic construct
  source 1..19: mol_type = other DNA
cctcgcagttcggttaatg

SEQ ID NO: 5072 - RNA, 19 nt, synthetic construct
  source 1..19: mol_type = other RNA
cctcgcagttcggttaatg

SEQ ID NO: 5073 - DNA, 21 bp, synthetic construct
  source 1..21: mol_type = other DNA
cctcgcagttcggttaatgcc

SEQ ID NO: 5074 - RNA, 21 nt, synthetic construct
  source 1..21: mol_type = other RNA
cctcgcagttcggttaatgcc

SEQ ID NO: 5075 - DNA, 19 bp, synthetic construct
  source 1..19: mol_type = other DNA
gctttggctcgggacttcc

SEQ ID NO: 5076 - DNA, 21 bp, synthetic construct
  source 1..21: mol_type = other DNA
gctttggctcgggacttcccc

SEQ ID NO: 5077 - RNA, 21 nt, synthetic construct
  source 1..21: mol_type = other RNA
gctttggctcgggacttcccc

SEQ ID NO: 5078 - DNA, 19 bp, synthetic construct
  source 1..19: mol_type = other DNA
tgaagtcccgagccaaagc

SEQ ID NO: 5079 - DNA, 21 bp, synthetic construct
  source 1..21: mol_type = other DNA
tgaagtcccgagccaaagctt

SEQ ID NO: 5080 - RNA, 21 nt, synthetic construct
  source 1..21: mol_type = other RNA
tgaagtcccgagccaaagctt

SEQ ID NO: 5081 - DNA, 19 bp, synthetic construct
  source 1..19: mol_type = other DNA
gctttggctcgggacttca

SEQ ID NO: 5082 - RNA, 19 nt, synthetic construct
  source 1..19: mol_type = other RNA
gctttggctcgggacttca

SEQ ID NO: 5083 - DNA, 21 bp, synthetic construct
  source 1..21: mol_type = other DNA
gctttggctcgggacttcacc

SEQ ID NO: 5084 - RNA, 21 nt, synthetic construct
  source 1..21: mol_type = other RNA
gctttggctcgggacttcacc

SEQ ID NO: 5085 - DNA, 19 bp, synthetic construct
  source 1..19: mol_type = other DNA
gctttggctcgggacttct

SEQ ID NO: 5086 - RNA, 19 nt, synthetic construct
  source 1..19: mol_type = other RNA
gctttggctcgggacttct

SEQ ID NO: 5087 - DNA, 21 bp, synthetic construct
  source 1..21: mol_type = other DNA
gctttggctcgggacttctcc

SEQ ID NO: 5088 - RNA, 21 nt, synthetic construct
  source 1..21: mol_type = other RNA
gctttggctcgggacttctcc

SEQ ID NO: 5089 - DNA, 19 bp, synthetic construct
  source 1..19: mol_type = other DNA
gctttggctggggacttcc

SEQ ID NO: 5090 - RNA, 19 nt, synthetic construct
  source 1..19: mol_type = other RNA
gctttggctggggacttcc

SEQ ID NO: 5091 - DNA, 21 bp, synthetic construct
  source 1..21: mol_type = other DNA
gctttggctggggacttcccc

SEQ ID NO: 5092 - RNA, 21 nt, synthetic construct
  source 1..21: mol_type = other RNA
gctttggctggggacttcccc

SEQ ID NO: 5093 - DNA, 19 bp, synthetic construct
  source 1..19: mol_type = other DNA
gctttggctcgggacttcg

SEQ ID NO: 5094 - RNA, 19 nt, synthetic construct
  source 1..19: mol_type = other RNA
gctttggctcgggacttcg

SEQ ID NO: 5095 - DNA, 21 bp, synthetic construct
  source 1..21: mol_type = other DNA
gctttggctcgggacttcgcc

SEQ ID NO: 5096 - RNA, 21 nt, synthetic construct
  source 1..21: mol_type = other RNA
gctttggctcgggacttcgcc

SEQ ID NO: 5097 - DNA, 21 bp, synthetic construct
  source 1..21: mol_type = other DNA
gctttggctcgggacttctct

SEQ ID NO: 5098 - RNA, 21 nt, synthetic construct
  source 1..21: mol_type = other RNA
gctttggctcgggacttctct

SEQ ID NO: 5099 - DNA, 19 bp, synthetic construct
  source 1..19: mol_type = other DNA
agctgaccttccgcgagac

SEQ ID NO: 5100 - DNA, 21 bp, synthetic construct
  source 1..21: mol_type = other DNA
agctgaccttccgcgagaccc

SEQ ID NO: 5101 - RNA, 21 nt, synthetic construct
  source 1..21: mol_type = other RNA
agctgaccttccgcgagaccc

SEQ ID NO: 5102 - DNA, 19 bp, synthetic construct
  source 1..19: mol_type = other DNA
ttctcgcggaaggtcagct

SEQ ID NO: 5103 - DNA, 21 bp, synthetic construct
  source 1..21: mol_type = other DNA
ttctcgcggaaggtcagcttt

SEQ ID NO: 5104 - RNA, 21 nt, synthetic construct
  source 1..21: mol_type = other RNA
ttctcgcggaaggtcagcttt

SEQ ID NO: 5105 - DNA, 19 bp, synthetic construct
  source 1..19: mol_type = other DNA
agctgaccttccgcgagaa

SEQ ID NO: 5106 - RNA, 19 nt, synthetic construct
  source 1..19: mol_type = other RNA
agctgaccttccgcgagaa

SEQ ID NO: 5107 - DNA, 21 bp, synthetic construct
  source 1..21: mol_type = other DNA
agctgaccttccgcgagaacc

SEQ ID NO: 5108 - RNA, 21 nt, synthetic construct
  source 1..21: mol_type = other RNA
agctgaccttccgcgagaacc

SEQ ID NO: 5109 - DNA, 19 bp, synthetic construct
  source 1..19: mol_type = other DNA
agctgaccttccgcgagat

SEQ ID NO: 5110 - RNA, 19 nt, synthetic construct
  source 1..19: mol_type = other RNA
agctgaccttccgcgagat

SEQ ID NO: 5111 - DNA, 21 bp, synthetic construct
  source 1..21: mol_type = other DNA
agctgaccttccgcgagatcc

SEQ ID NO: 5112 - RNA, 21 nt, synthetic construct
  source 1..21: mol_type = other RNA
agctgaccttccgcgagatcc

SEQ ID NO: 5113 - DNA, 19 bp, synthetic construct
  source 1..19: mol_type = other DNA
agctgacctaccgcgagac

SEQ ID NO: 5114 - RNA, 19 nt, synthetic construct
  source 1..19: mol_type = other RNA
agctgacctaccgcgagac

SEQ ID NO: 5115 - DNA, 21 bp, synthetic construct
  source 1..21: mol_type = other DNA
agctgacctaccgcgagaccc

SEQ ID NO: 5116 - RNA, 21 nt, synthetic construct
  source 1..21: mol_type = other RNA
agctgacctaccgcgagaccc

SEQ ID NO: 5117 - DNA, 19 bp, synthetic construct
  source 1..19: mol_type = other DNA
agctgaccttccgcgagag

SEQ ID NO: 5118 - RNA, 19 nt, synthetic construct
  source 1..19: mol_type = other RNA
agctgaccttccgcgagag

SEQ ID NO: 5119 - DNA, 21 bp, synthetic construct
  source 1..21: mol_type = other DNA
agctgaccttccgcgagagcc

SEQ ID NO: 5120 - RNA, 21 nt, synthetic construct
  source 1..21: mol_type = other RNA
agctgaccttccgcgagagcc

SEQ ID NO: 5121 - DNA, 21 bp, synthetic construct
  source 1..21: mol_type = other DNA
agctgaccttccgcgagatct

SEQ ID NO: 5122 - RNA, 21 nt, synthetic construct
  source 1..21: mol_type = other RNA
agctgaccttccgcgagatct

SEQ ID NO: 5123 - DNA, 19 bp, synthetic construct
  source 1..19: mol_type = other DNA
gccgtcttccgccaagagc

SEQ ID NO: 5124 - DNA, 21 bp, synthetic construct
  source 1..21: mol_type = other DNA
gccgtcttccgccaagagccc

SEQ ID NO: 5125 - RNA, 21 nt, synthetic construct
  source 1..21: mol_type = other RNA
gccgtcttccgccaagagccc

SEQ ID NO: 5126 - DNA, 19 bp, synthetic construct
  source 1..19: mol_type = other DNA
tctcttggcggaagacggc

SEQ ID NO: 5127 - DNA, 21 bp, synthetic construct
  source 1..21: mol_type = other DNA
tctcttggcggaagacggctt

SEQ ID NO: 5128 - RNA, 21 nt, synthetic construct
  source 1..21: mol_type = other RNA
tctcttggcggaagacggctt

SEQ ID NO: 5129 - DNA, 19 bp, synthetic construct
  source 1..19: mol_type = other DNA
gccgtcttccgccaagaga

SEQ ID NO: 5130 - RNA, 19 nt, synthetic construct
  source 1..19: mol_type = other RNA
gccgtcttccgccaagaga

SEQ ID NO: 5131 - DNA, 21 bp, synthetic construct
  source 1..21: mol_type = other DNA
gccgtcttccgccaagagacc

SEQ ID NO: 5132 - RNA, 21 nt, synthetic construct
  source 1..21: mol_type = other RNA
gccgtcttccgccaagagacc

SEQ ID NO: 5133 - DNA, 19 bp, synthetic construct
  source 1..19: mol_type = other DNA
gccgtcttccgccaagagt

SEQ ID NO: 5134 - RNA, 19 nt, synthetic construct
  source 1..19: mol_type = other RNA
gccgtcttccgccaagagt

SEQ ID NO: 5135 - DNA, 21 bp, synthetic construct
  source 1..21: mol_type = other DNA
gccgtcttccgccaagagtcc

SEQ ID NO: 5136 - RNA, 21 nt, synthetic construct
  source 1..21: mol_type = other RNA
gccgtcttccgccaagagtcc

SEQ ID NO: 5137 - DNA, 19 bp, synthetic construct
  source 1..19: mol_type = other DNA
gccgtcttcggccaagagc

SEQ ID NO: 5138 - RNA, 19 nt, synthetic construct
  source 1..19: mol_type = other RNA
gccgtcttcggccaagagc

SEQ ID NO: 5139 - DNA, 21 bp, synthetic construct
  source 1..21: mol_type = other DNA
gccgtcttcggccaagagccc

SEQ ID NO: 5140 - RNA, 21 nt, synthetic construct
  source 1..21: mol_type = other RNA
gccgtcttcggccaagagccc

SEQ ID NO: 5141 - DNA, 19 bp, synthetic construct
  source 1..19: mol_type = other DNA
gccgtcttccgccaagagg

SEQ ID NO: 5142 - RNA, 19 nt, synthetic construct
  source 1..19: mol_type = other RNA
gccgtcttccgccaagagg

SEQ ID NO: 5143 - DNA, 21 bp, synthetic construct
  source 1..21: mol_type = other DNA
gccgtcttccgccaagaggcc

SEQ ID NO: 5144 - RNA, 21 nt, synthetic construct
  source 1..21: mol_type = other RNA
gccgtcttccgccaagaggcc

SEQ ID NO: 5145 - DNA, 21 bp, synthetic construct
  source 1..21: mol_type = other DNA
gccgtcttccgccaagagtct

SEQ ID NO: 5146 - RNA, 21 nt, synthetic construct
  source 1..21: mol_type = other RNA
gccgtcttccgccaagagtct

SEQ ID NO: 5147 - protein, 743 aa, synthetic construct
MAADGYLPDWLEDNLSEGIREWWALKPGAPQPKANQQHQDNARGLVLPGYKYLGPGNGLDKGEPVNAADAAALEHDKAYDQQLKAGDNPYLKYNHADAEFQERLKEDTSFGGNLGRAVFQAKKRLLEPLGLVEEAAKTAPGKKRPVEQSPQEPDSSAGIGKSGAQPAKKRLNFGQTGDTESVPDPQPIGEPPAAPSGVGSLTMASGGGAPVADNNEGADGVGSSSGNWHCDSQWLGDRVITTSTRTWALPTYNNHLYKQISNSTSGGSSNDNAYFGYSTPWGYFDFNRFHCHFSPRDWQRLINNNWGFRPKRLNFKLFNIQVKEVTDNNGVKTIANNLTSTVQVFTDSDYQLPYVLGSAHEGCLPPFPADVFMIPQYGYLTLNDGSQAVGRSSFYCLEYFPSQMLRTGNNFQFSYEFENVPFHSSYAHSQSLDRLMNPLIDQYLYYLSKTINGSGQNQQTLKFSVAGPSNMAVQGRNYIPGPSYRQQRVSTTVTQNNNSEFAWPGASSWALNGRNSLMNPGPAMASHKEGEDRFFPLSGSLIFGKQGTGRDNVDADKVMITNEEEIKTTNPVATESYGQVATNHQSDGTGSTTGWAQAQTGWVQNQGILPGMVWQDRDVYLQGPIWAKIPHTDGNFHPSPLMGGFGMKHPPPQILIKNTPVPADPPTAFNKDKLNSFITQYSTGQVSVEIEWELQKENSKRWNPEIQYTSNYYKSNNVEFAVNTEGVYSEPRPIGTRYLTRNL

SEQ ID NO: 5148 - DNA, 2232 bp, synthetic construct
  source 1..2232: mol_type = other DNA
atggctgccgatggttatcttccagattggctcgaggacaaccttagtgaaggaattcgcgagtggtgggctttgaaacctggagcccctcaacccaaggcaaatcaacaacatcaagacaacgctcgaggtcttgtgcttccgggttacaaataccttggacccggcaacggactcgacaagggggagccggtcaacgcagcagacgcggcggccctcgagcacgacaaggcctacgaccagcagctcaaggccggagacaacccgtacctcaagtacaaccacgccgacgccgagttccaggagcggctcaaagaagatacgtcttttgggggcaacctcgggcgagcagtcttccaggccaaaaagaggcttcttgaacctcttggtctggttgaggaagcggctaagacggctcctggaaagaagaggcctgtagagcagtctcctcaggaaccggactcctccgcgggtattggcaaatcgggtgcacagcccgctaaaaagagactcaatttcggtcagactggcgacacagagtcagtcccagaccctcaaccaatcggagaacctcccgcagccccctcaggtgtgggatctcttacaatggcttcaggtggtggcgcaccagtggcagacaataacgaaggtgccgatggagtgggtagttcctcgggaaattggcattgcgattcccaatggctgggggacagagtcatcaccaccagcacccgaacctgggccctgcccacctacaacaatcacctctacaagcaaatctccaacagcacatctggaggatcttcaaatgacaacgcctacttcggctacagcaccccctgggggtattttgacttcaacagattccactgccacttctcaccacgtgactggcagcgactcatcaacaacaactggggattccggcctaagcgactcaacttcaagctcttcaacattcaggtcaaagaggttacggacaacaatggagtcaagaccatcgccaataaccttaccagcacggtccaggtcttcacggactcagactatcagctcccgtacgtgctcgggtcggctcacgagggctgcctcccgccgttcccagcggacgttttcatgattcctcagtacgggtatctgacgcttaatgatggaagccaggccgtgggtcgttcgtccttttactgcctggaatatttcccgtcgcaaatgctaagaacgggtaacaacttccagttcagctacgagtttgagaacgtacctttccatagcagctacgctcacagccaaagcctggaccgactaatgaatccactcatcgaccaatacttgtactatctctcaaagactattaacggttctggacagaatcaacaaacgctaaaattcagtgtggccggacccagcaacatggctgtccagggaagaaactacatacctggacccagctaccgacaacaacgtgtctcaaccactgtgactcaaaacaacaacagcgaatttgcttggcctggagcttcttcttgggctctcaatggacgtaatagcttgatgaatcctggacctgctatggccagccacaaagaaggagaggaccgtttctttcctttgtctggatctttaatttttggcaaacaaggaactggaagagacaacgtggatgcggacaaagtcatgataaccaacgaagaagaaattaaaactactaacccggtagcaacggagtcctatggacaagtggccacaaaccaccagagtgacggaacaggaagcacaacaggatgggcacaggcgcagaccggctgggttcaaaaccaaggaatacttccgggtatggtttggcaggacagagatgtgtacctgcaaggacccatttgggccaaaattcctcacacggacggcaactttcacccttctccgctgatgggagggtttggaatgaagcacccgcctcctcagatcctcatcaaaaacacacctgtacctgccgatcctccaacggccttcaacaaggacaagctgaactctttcatcacccagtattctactggccaagtcagcgtggagatcgagtgggagctgcagaaggaaaacagcaagcggtggaacccggagatccagtacacttccaactattacaagtctaataatgttgaatttgctgttaatactgaaggtgtatatagtgaaccccgccccattggcaccagatacctgactcgtaatctgtaa

SEQ ID NO: 5149 - DNA, 2300 bp, synthetic construct
  source 1..2300: mol_type = other DNA
ctgcgcgctcgctcgctcactgaggccgcccgggcaaagcccgggcgtcgggcgacctttggtcgcccggcctcagtgagcgagcgagcgcgcagagagggagtgtagccatgctctaggaagatcaattcaattcacgcgtcgacattgattattgactagttattaatagtaatcaattacggggtcattagttcatagcccatatatggagttccgcgttacataacttacggtaaatggcccgcctggctgaccgcccaacgacccccgcccattgacgtcaataatgacgtatgttcccatagtaacgccaatagggactttccattgacgtcaatgggtggagtatttacggtaaactgcccacttggcagtacatcaagtgtatcatatgccaagtacgccccctattgacgtcaatgacggtaaatggcccgcctggcattatgcccagtacatgaccttatgggactttcctacttggcagtacatctacgtattagtcatcgctattaccatgtcgaggccacgttctgcttcactctccccatctcccccccctccccacccccaattttgtatttatttattttttaattattttgtgcagcgatgggggcggggggggggggcgcgcgccaggcggggcggggcggggcgaggggcggggcggggcgaggcggagaggtgcggcggcagccaatcagagcggcgcgctccgaaagtttccttttatggcgaggcggcggcggcggcggccctataaaaagcgaagcgcgcggcgggcgggagcaagcttcgtttagtgaaccgtcagatcgcctggagacgccatccacgctgttttgacctccatagaagacaccgggaccgatccagcctccgcggattcgaatcccggccgggaacggtgcattggaacgcggattccccgtgccaagagtgacgtaagtaccgcctatagagtctataggcccacaaaaaatgctttcttcttttaatatacttttttgtttatcttatttctaatactttccctaatctctttctttcagggcaataatgatacaatgtatcatgcctctttgcaccattctaaagaataacagtgataatttctgggttaaggcaatagcaatatttctgcatataaatatttctgcatataaattgtaactgatgtaagaggtttcatattgctaatagcagctacaatccagctaccattctgcttttattttatggttgggataaggctggattattctgagtccaagctaggcccttttgctaatcatgttcatacctcttatcttcctcccacagctcctgggcaacgtgctggtctgtgtgctggcccatcactttggcaaagaattgggattcgaaccggtgaagcaaagaaggggcagagggagcccgtgagctgagtgggccagggactgggagaaggagtgaggaggcagggccggcatgcctctgctgctggccagacctcgcagttcggttaattctgtctgcacctgtcactagtattaaccgaactgcgaggtttggccgtgtagtgctacccagcgctggctgcctcctcagcattgcaattcctctcccatctgggcaccagtcagctaccctggtgggaatctgggtagccctcgaggggtggcatccctgtgacccctccccagtgcctctcctggccctggaagttgccactccagtgcccaccagccttgtcctaataaaattaagttgcatcattttgtctgactaggtgtccttctataatattatggggtggaggggggtggtatggagcaaggggcaagttgggaagacaacctgtagggcctgcggggtctattgggaaccaagctggagtgcagtggcacaatcttggctcactgcaatctccgcctcctgggttcaagcgattctcctgcctcagcctcccgagttgttgggattccaggcatgcatgaccaggctcagctaatttttgtttttttggtagagacggggtttcaccatattggccaggctggtctccaactcctaatctcaggtgatctacccaccttggcctcccaaattgctgggattacaggcgtgaaccactgctcccttccctgtccttatcgatgcctagggttaatcattaactacaaggaacccctagtgatggagttggccactccctctctgcgcgctcgctcgctcactgaggccgggcgaccaaaggtcgcccgacgcccgggctttgcccgggcggcctcagtgagcgagcgagcgcgcag

SEQ ID NO: 5150 - DNA, 2300 bp, synthetic construct
  source 1..2300: mol_type = other DNA
ctgcgcgctcgctcgctcactgaggccgcccgggcaaagcccgggcgtcgggcgacctttggtcgcccggcctcagtgagcgagcgagcgcgcagagagggagtgtagccatgctctaggaagatcaattcaattcacgcgtcgacattgattattgactagttattaatagtaatcaattacggggtcattagttcatagcccatatatggagttccgcgttacataacttacggtaaatggcccgcctggctgaccgcccaacgacccccgcccattgacgtcaataatgacgtatgttcccatagtaacgccaatagggactttccattgacgtcaatgggtggagtatttacggtaaactgcccacttggcagtacatcaagtgtatcatatgccaagtacgccccctattgacgtcaatgacggtaaatggcccgcctggcattatgcccagtacatgaccttatgggactttcctacttggcagtacatctacgtattagtcatcgctattaccatgtcgaggccacgttctgcttcactctccccatctcccccccctccccacccccaattttgtatttatttattttttaattattttgtgcagcgatgggggcggggggggggggcgcgcgccaggcggggcggggcggggcgaggggcggggcggggcgaggcggagaggtgcggcggcagccaatcagagcggcgcgctccgaaagtttccttttatggcgaggcggcggcggcggcggccctataaaaagcgaagcgcgcggcgggcgggagcaagcttcgtttagtgaaccgtcagatcgcctggagacgccatccacgctgttttgacctccatagaagacaccgggaccgatccagcctccgcggattcgaatcccggccgggaacggtgcattggaacgcggattccccgtgccaagagtgacgtaagtaccgcctatagagtctataggcccacaaaaaatgctttcttcttttaatatacttttttgtttatcttatttctaatactttccctaatctctttctttcagggcaataatgatacaatgtatcatgcctctttgcaccattctaaagaataacagtgataatttctgggttaaggcaatagcaatatttctgcatataaatatttctgcatataaattgtaactgatgtaagaggtttcatattgctaatagcagctacaatccagctaccattctgcttttattttatggttgggataaggctggattattctgagtccaagctaggcccttttgctaatcatgttcatacctcttatcttcctcccacagctcctgggcaacgtgctggtctgtgtgctggcccatcactttggcaaagaattgggattcgaaccggtgaagcaaagaaggggcagagggagcccgtgagctgagtgggccagggactgggagaaggagtgaggaggcagggccggcatgcctctgctgctggccagagctttggctcgggacttctctgtctgcacctgtcactagtgaagtcccgagccaaagctttggccgtgtagtgctacccagcgctggctgcctcctcagcattgcaattcctctcccatctgggcaccagtcagctaccctggtgggaatctgggtagccctcgaggggtggcatccctgtgacccctccccagtgcctctcctggccctggaagttgccactccagtgcccaccagccttgtcctaataaaattaagttgcatcattttgtctgactaggtgtccttctataatattatggggtggaggggggtggtatggagcaaggggcaagttgggaagacaacctgtagggcctgcggggtctattgggaaccaagctggagtgcagtggcacaatcttggctcactgcaatctccgcctcctgggttcaagcgattctcctgcctcagcctcccgagttgttgggattccaggcatgcatgaccaggctcagctaatttttgtttttttggtagagacggggtttcaccatattggccaggctggtctccaactcctaatctcaggtgatctacccaccttggcctcccaaattgctgggattacaggcgtgaaccactgctcccttccctgtccttatcgatgcctagggttaatcattaactacaaggaacccctagtgatggagttggccactccctctctgcgcgctcgctcgctcactgaggccgggcgaccaaaggtcgcccgacgcccgggctttgcccgggcggcctcagtgagcgagcgagcgcgcag

SEQ ID NO: 5151 - DNA, 2300 bp, synthetic construct
  source 1..2300: mol_type = other DNA
ctgcgcgctcgctcgctcactgaggccgcccgggcaaagcccgggcgtcgggcgacctttggtcgcccggcctcagtgagcgagcgagcgcgcagagagggagtgtagccatgctctaggaagatcaattcaattcacgcgtcgacattgattattgactagttattaatagtaatcaattacggggtcattagttcatagcccatatatggagttccgcgttacataacttacggtaaatggcccgcctggctgaccgcccaacgacccccgcccattgacgtcaataatgacgtatgttcccatagtaacgccaatagggactttccattgacgtcaatgggtggagtatttacggtaaactgcccacttggcagtacatcaagtgtatcatatgccaagtacgccccctattgacgtcaatgacggtaaatggcccgcctggcattatgcccagtacatgaccttatgggactttcctacttggcagtacatctacgtattagtcatcgctattaccatgtcgaggccacgttctgcttcactctccccatctcccccccctccccacccccaattttgtatttatttattttttaattattttgtgcagcgatgggggcggggggggggggcgcgcgccaggcggggcggggcggggcgaggggcggggcggggcgaggcggagaggtgcggcggcagccaatcagagcggcgcgctccgaaagtttccttttatggcgaggcggcggcggcggcggccctataaaaagcgaagcgcgcggcgggcgggagcaagcttcgtttagtgaaccgtcagatcgcctggagacgccatccacgctgttttgacctccatagaagacaccgggaccgatccagcctccgcggattcgaatcccggccgggaacggtgcattggaacgcggattccccgtgccaagagtgacgtaagtaccgcctatagagtctataggcccacaaaaaatgctttcttcttttaatatacttttttgtttatcttatttctaatactttccctaatctctttctttcagggcaataatgatacaatgtatcatgcctctttgcaccattctaaagaataacagtgataatttctgggttaaggcaatagcaatatttctgcatataaatatttctgcatataaattgtaactgatgtaagaggtttcatattgctaatagcagctacaatccagctaccattctgcttttattttatggttgggataaggctggattattctgagtccaagctaggcccttttgctaatcatgttcatacctcttatcttcctcccacagctcctgggcaacgtgctggtctgtgtgctggcccatcactttggcaaagaattgggattcgaaccggtgaagcaaagaaggggcagagggagcccgtgagctgagtgggccagggactgggagaaggagtgaggaggcagggccggcatgcctctgctgctggccagaagctgaccttccgcgagatctgtctgcacctgtcactagttctcgcggaaggtcagcttttggccgtgtagtgctacccagcgctggctgcctcctcagcattgcaattcctctcccatctgggcaccagtcagctaccctggtgggaatctgggtagccctcgaggggtggcatccctgtgacccctccccagtgcctctcctggccctggaagttgccactccagtgcccaccagccttgtcctaataaaattaagttgcatcattttgtctgactaggtgtccttctataatattatggggtggaggggggtggtatggagcaaggggcaagttgggaagacaacctgtagggcctgcggggtctattgggaaccaagctggagtgcagtggcacaatcttggctcactgcaatctccgcctcctgggttcaagcgattctcctgcctcagcctcccgagttgttgggattccaggcatgcatgaccaggctcagctaatttttgtttttttggtagagacggggtttcaccatattggccaggctggtctccaactcctaatctcaggtgatctacccaccttggcctcccaaattgctgggattacaggcgtgaaccactgctcccttccctgtccttatcgatgcctagggttaatcattaactacaaggaacccctagtgatggagttggccactccctctctgcgcgctcgctcgctcactgaggccgggcgaccaaaggtcgcccgacgcccgggctttgcccgggcggcctcagtgagcgagcgagcgcgcag

SEQ ID NO: 5152 - DNA, 2300 bp, synthetic construct
  source 1..2300: mol_type = other DNA
ctgcgcgctcgctcgctcactgaggccgcccgggcaaagcccgggcgtcgggcgacctttggtcgcccggcctcagtgagcgagcgagcgcgcagagagggagtgtagccatgctctaggaagatcaattcaattcacgcgtcgacattgattattgactagttattaatagtaatcaattacggggtcattagttcatagcccatatatggagttccgcgttacataacttacggtaaatggcccgcctggctgaccgcccaacgacccccgcccattgacgtcaataatgacgtatgttcccatagtaacgccaatagggactttccattgacgtcaatgggtggagtatttacggtaaactgcccacttggcagtacatcaagtgtatcatatgccaagtacgccccctattgacgtcaatgacggtaaatggcccgcctggcattatgcccagtacatgaccttatgggactttcctacttggcagtacatctacgtattagtcatcgctattaccatgtcgaggccacgttctgcttcactctccccatctcccccccctccccacccccaattttgtatttatttattttttaattattttgtgcagcgatgggggcggggggggggggcgcgcgccaggcggggcggggcggggcgaggggcggggcggggcgaggcggagaggtgcggcggcagccaatcagagcggcgcgctccgaaagtttccttttatggcgaggcggcggcggcggcggccctataaaaagcgaagcgcgcggcgggcgggagcaagcttcgtttagtgaaccgtcagatcgcctggagacgccatccacgctgttttgacctccatagaagacaccgggaccgatccagcctccgcggattcgaatcccggccgggaacggtgcattggaacgcggattccccgtgccaagagtgacgtaagtaccgcctatagagtctataggcccacaaaaaatgctttcttcttttaatatacttttttgtttatcttatttctaatactttccctaatctctttctttcagggcaataatgatacaatgtatcatgcctctttgcaccattctaaagaataacagtgataatttctgggttaaggcaatagcaatatttctgcatataaatatttctgcatataaattgtaactgatgtaagaggtttcatattgctaatagcagctacaatccagctaccattctgcttttattttatggttgggataaggctggattattctgagtccaagctaggcccttttgctaatcatgttcatacctcttatcttcctcccacagctcctgggcaacgtgctggtctgtgtgctggcccatcactttggcaaagaattgggattcgaaccggtgaagcaaagaaggggcagagggagcccgtgagctgagtgggccagggactgggagaaggagtgaggaggcagggccggcatgcctctgctgctggccagagccgtcttccgccaagagtctgtctgcacctgtcactagtctcttggcggaagacggctttggccgtgtagtgctacccagcgctggctgcctcctcagcattgcaattcctctcccatctgggcaccagtcagctaccctggtgggaatctgggtagccctcgaggggtggcatccctgtgacccctccccagtgcctctcctggccctggaagttgccactccagtgcccaccagccttgtcctaataaaattaagttgcatcattttgtctgactaggtgtccttctataatattatggggtggaggggggtggtatggagcaaggggcaagttgggaagacaacctgtagggcctgcggggtctattgggaaccaagctggagtgcagtggcacaatcttggctcactgcaatctccgcctcctgggttcaagcgattctcctgcctcagcctcccgagttgttgggattccaggcatgcatgaccaggctcagctaatttttgtttttttggtagagacggggtttcaccatattggccaggctggtctccaactcctaatctcaggtgatctacccaccttggcctcccaaattgctgggattacaggcgtgaaccactgctcccttccctgtccttatcgatgcctagggttaatcattaactacaaggaacccctagtgatggagttggccactccctctctgcgcgctcgctcgctcactgaggccgggcgaccaaaggtcgcccgacgcccgggctttgcccgggcggcctcagtgagcgagcgagcgcgcag

SEQ ID NO: 5153 - DNA, 2198 bp, synthetic construct
  source 1..2198: mol_type = other DNA
ctgcgcgctcgctcgctcactgaggccgcccgggcaaagcccgggcgtcgggcgacctttggtcgcccggcctcagtgagcgagcgagcgcgcagagagggagtgtagccatgctctaggaagatcaattcaattcacgcgtcgacattgattattgactagttattaatagtaatcaattacggggtcattagttcatagcccatatatggagttccgcgttacataacttacggtaaatggcccgcctggctgaccgcccaacgacccccgcccattgacgtcaataatgacgtatgttcccatagtaacgccaatagggactttccattgacgtcaatgggtggagtatttacggtaaactgcccacttggcagtacatcaagtgtatcatatgccaagtacgccccctattgacgtcaatgacggtaaatggcccgcctggcattatgcccagtacatgaccttatgggactttcctacttggcagtacatctacgtattagtcatcgctattaccatgtcgaggccacgttctgcttcactctccccatctcccccccctccccacccccaattttgtatttatttattttttaattattttgtgcagcgatgggggcggggggggggggcgcgcgccaggcggggcggggcggggcgaggggcggggcggggcgaggcggagaggtgcggcggcagccaatcagagcggcgcgctccgaaagtttccttttatggcgaggcggcggcggcggcggccctataaaaagcgaagcgcgcggcgggcgggagcaagcttcgtttagtgaaccgtcagatcgcctggagacgccatccacgctgttttgacctccatagaagacaccgggaccgatccagcctccgcggattcgaatcccggccgggaacggtgcattggaacgcggattccccgtgccaagagtgacgtaagtaccgcctatagagtctataggcccacaaaaaatgctttcttcttttaatatacttttttgtttatcttatttctaatactttccctaatctctttctttcagggcaataatgatacaatgtatcatgcctctttgcaccattctaaagaataacagtgataatttctgggttaaggcaatagcaatatttctgcatataaatatttctgcatataaattgtaactgatgtaagaggtttcatattgctaatagcagctacaatccagctaccattctgcttttattttatggttgggataaggctggattattctgagtccaagctaggcccttttgctaatcatgttcatacctcttatcttcctcccacagctcctgggcaacgtgctggtctgtgtgctggcccatcactttggcaaagaattgggattcgaaccggtgtgctgggcggggggcggcgggccctcccgcagaacaccatgcgctcttcggaacctcgcagttcggttaatgcctgtgacctggtattaaccgaactgcgaggttctgtggagcgccttgacagcagccatgggagggccgccccctacctcagtgactcgaggggtggcatccctgtgacccctccccagtgcctctcctggccctggaagttgccactccagtgcccaccagccttgtcctaataaaattaagttgcatcattttgtctgactaggtgtccttctataatattatggggtggaggggggtggtatggagcaaggggcaagttgggaagacaacctgtagggcctgcggggtctattgggaaccaagctggagtgcagtggcacaatcttggctcactgcaatctccgcctcctgggttcaagcgattctcctgcctcagcctcccgagttgttgggattccaggcatgcatgaccaggctcagctaatttttgtttttttggtagagacggggtttcaccatattggccaggctggtctccaactcctaatctcaggtgatctacccaccttggcctcccaaattgctgggattacaggcgtgaaccactgctcccttccctgtccttatcgatgcctagggttaatcattaactacaaggaacccctagtgatggagttggccactccctctctgcgcgctcgctcgctcactgaggccgggcgaccaaaggtcgcccgacgcccgggctttgcccgggcggcctcagtgagcgagcgagcgcgcag

SEQ ID NO: 5154 - DNA, 2198 bp, synthetic construct
  source 1..2198: mol_type = other DNA
ctgcgcgctcgctcgctcactgaggccgcccgggcaaagcccgggcgtcgggcgacctttggtcgcccggcctcagtgagcgagcgagcgcgcagagagggagtgtagccatgctctaggaagatcaattcaattcacgcgtcgacattgattattgactagttattaatagtaatcaattacggggtcattagttcatagcccatatatggagttccgcgttacataacttacggtaaatggcccgcctggctgaccgcccaacgacccccgcccattgacgtcaataatgacgtatgttcccatagtaacgccaatagggactttccattgacgtcaatgggtggagtatttacggtaaactgcccacttggcagtacatcaagtgtatcatatgccaagtacgccccctattgacgtcaatgacggtaaatggcccgcctggcattatgcccagtacatgaccttatgggactttcctacttggcagtacatctacgtattagtcatcgctattaccatgtcgaggccacgttctgcttcactctccccatctcccccccctccccacccccaattttgtatttatttattttttaattattttgtgcagcgatgggggcggggggggggggcgcgcgccaggcggggcggggcggggcgaggggcggggcggggcgaggcggagaggtgcggcggcagccaatcagagcggcgcgctccgaaagtttccttttatggcgaggcggcggcggcggcggccctataaaaagcgaagcgcgcggcgggcgggagcaagcttcgtttagtgaaccgtcagatcgcctggagacgccatccacgctgttttgacctccatagaagacaccgggaccgatccagcctccgcggattcgaatcccggccgggaacggtgcattggaacgcggattccccgtgccaagagtgacgtaagtaccgcctatagagtctataggcccacaaaaaatgctttcttcttttaatatacttttttgtttatcttatttctaatactttccctaatctctttctttcagggcaataatgatacaatgtatcatgcctctttgcaccattctaaagaataacagtgataatttctgggttaaggcaatagcaatatttctgcatataaatatttctgcatataaattgtaactgatgtaagaggtttcatattgctaatagcagctacaatccagctaccattctgcttttattttatggttgggataaggctggattattctgagtccaagctaggcccttttgctaatcatgttcatacctcttatcttcctcccacagctcctgggcaacgtgctggtctgtgtgctggcccatcactttggcaaagaattgggattcgaaccggtgtgctgggcggggggcggcgggccctcccgcagaacaccatgcgctcttcggaagctttggctcgggacttcgcctgtgacctggtgaagtcccgagccaaagcttctgtggagcgccttgacagcagccatgggagggccgccccctacctcagtgactcgaggggtggcatccctgtgacccctccccagtgcctctcctggccctggaagttgccactccagtgcccaccagccttgtcctaataaaattaagttgcatcattttgtctgactaggtgtccttctataatattatggggtggaggggggtggtatggagcaaggggcaagttgggaagacaacctgtagggcctgcggggtctattgggaaccaagctggagtgcagtggcacaatcttggctcactgcaatctccgcctcctgggttcaagcgattctcctgcctcagcctcccgagttgttgggattccaggcatgcatgaccaggctcagctaatttttgtttttttggtagagacggggtttcaccatattggccaggctggtctccaactcctaatctcaggtgatctacccaccttggcctcccaaattgctgggattacaggcgtgaaccactgctcccttccctgtccttatcgatgcctagggttaatcattaactacaaggaacccctagtgatggagttggccactccctctctgcgcgctcgctcgctcactgaggccgggcgaccaaaggtcgcccgacgcccgggctttgcccgggcggcctcagtgagcgagcgagcgcgcag

SEQ ID NO: 5155 - DNA, 2198 bp, synthetic construct
  source 1..2198: mol_type = other DNA
ctgcgcgctcgctcgctcactgaggccgcccgggcaaagcccgggcgtcgggcgacctttggtcgcccggcctcagtgagcgagcgagcgcgcagagagggagtgtagccatgctctaggaagatcaattcaattcacgcgtcgacattgattattgactagttattaatagtaatcaattacggggtcattagttcatagcccatatatggagttccgcgttacataacttacggtaaatggcccgcctggctgaccgcccaacgacccccgcccattgacgtcaataatgacgtatgttcccatagtaacgccaatagggactttccattgacgtcaatgggtggagtatttacggtaaactgcccacttggcagtacatcaagtgtatcatatgccaagtacgccccctattgacgtcaatgacggtaaatggcccgcctggcattatgcccagtacatgaccttatgggactttcctacttggcagtacatctacgtattagtcatcgctattaccatgtcgaggccacgttctgcttcactctccccatctcccccccctccccacccccaattttgtatttatttattttttaattattttgtgcagcgatgggggcggggggggggggcgcgcgccaggcggggcggggcggggcgaggggcggggcggggcgaggcggagaggtgcggcggcagccaatcagagcggcgcgctccgaaagtttccttttatggcgaggcggcggcggcggcggccctataaaaagcgaagcgcgcggcgggcgggagcaagcttcgtttagtgaaccgtcagatcgcctggagacgccatccacgctgttttgacctccatagaagacaccgggaccgatccagcctccgcggattcgaatcccggccgggaacggtgcattggaacgcggattccccgtgccaagagtgacgtaagtaccgcctatagagtctataggcccacaaaaaatgctttcttcttttaatatacttttttgtttatcttatttctaatactttccctaatctctttctttcagggcaataatgatacaatgtatcatgcctctttgcaccattctaaagaataacagtgataatttctgggttaaggcaatagcaatatttctgcatataaatatttctgcatataaattgtaactgatgtaagaggtttcatattgctaatagcagctacaatccagctaccattctgcttttattttatggttgggataaggctggattattctgagtccaagctaggcccttttgctaatcatgttcatacctcttatcttcctcccacagctcctgggcaacgtgctggtctgtgtgctggcccatcactttggcaaagaattgggattcgaaccggtgtgctgggcggggggcggcgggccctcccgcagaacaccatgcgctcttcggaaagctgaccttccgcgagagcctgtgacctggttctcgcggaaggtcagctttctgtggagcgccttgacagcagccatgggagggccgccccctacctcagtgactcgaggggtggcatccctgtgacccctccccagtgcctctcctggccctggaagttgccactccagtgcccaccagccttgtcctaataaaattaagttgcatcattttgtctgactaggtgtccttctataatattatggggtggaggggggtggtatggagcaaggggcaagttgggaagacaacctgtagggcctgcggggtctattgggaaccaagctggagtgcagtggcacaatcttggctcactgcaatctccgcctcctgggttcaagcgattctcctgcctcagcctcccgagttgttgggattccaggcatgcatgaccaggctcagctaatttttgtttttttggtagagacggggtttcaccatattggccaggctggtctccaactcctaatctcaggtgatctacccaccttggcctcccaaattgctgggattacaggcgtgaaccactgctcccttccctgtccttatcgatgcctagggttaatcattaactacaaggaacccctagtgatggagttggccactccctctctgcgcgctcgctcgctcactgaggccgggcgaccaaaggtcgcccgacgcccgggctttgcccgggcggcctcagtgagcgagcgagcgcgcag

SEQ ID NO: 5156 - DNA, 2198 bp, synthetic construct
  source 1..2198: mol_type = other DNA
ctgcgcgctcgctcgctcactgaggccgcccgggcaaagcccgggcgtcgggcgacctttggtcgcccggcctcagtgagcgagcgagcgcgcagagagggagtgtagccatgctctaggaagatcaattcaattcacgcgtcgacattgattattgactagttattaatagtaatcaattacggggtcattagttcatagcccatatatggagttccgcgttacataacttacggtaaatggcccgcctggctgaccgcccaacgacccccgcccattgacgtcaataatgacgtatgttcccatagtaacgccaatagggactttccattgacgtcaatgggtggagtatttacggtaaactgcccacttggcagtacatcaagtgtatcatatgccaagtacgccccctattgacgtcaatgacggtaaatggcccgcctggcattatgcccagtacatgaccttatgggactttcctacttggcagtacatctacgtattagtcatcgctattaccatgtcgaggccacgttctgcttcactctccccatctcccccccctccccacccccaattttgtatttatttattttttaattattttgtgcagcgatgggggcggggggggggggcgcgcgccaggcggggcggggcggggcgaggggcggggcggggcgaggcggagaggtgcggcggcagccaatcagagcggcgcgctccgaaagtttccttttatggcgaggcggcggcggcggcggccctataaaaagcgaagcgcgcggcgggcgggagcaagcttcgtttagtgaaccgtcagatcgcctggagacgccatccacgctgttttgacctccatagaagacaccgggaccgatccagcctccgcggattcgaatcccggccgggaacggtgcattggaacgcggattccccgtgccaagagtgacgtaagtaccgcctatagagtctataggcccacaaaaaatgctttcttcttttaatatacttttttgtttatcttatttctaatactttccctaatctctttctttcagggcaataatgatacaatgtatcatgcctctttgcaccattctaaagaataacagtgataatttctgggttaaggcaatagcaatatttctgcatataaatatttctgcatataaattgtaactgatgtaagaggtttcatattgctaatagcagctacaatccagctaccattctgcttttattttatggttgggataaggctggattattctgagtccaagctaggcccttttgctaatcatgttcatacctcttatcttcctcccacagctcctgggcaacgtgctggtctgtgtgctggcccatcactttggcaaagaattgggattcgaaccggtgtgctgggcggggggcggcgggccctcccgcagaacaccatgcgctcttcggaagccgtcttccgccaagaggcctgtgacctggtctcttggcggaagacggcttctgtggagcgccttgacagcagccatgggagggccgccccctacctcagtgactcgaggggtggcatccctgtgacccctccccagtgcctctcctggccctggaagttgccactccagtgcccaccagccttgtcctaataaaattaagttgcatcattttgtctgactaggtgtccttctataatattatggggtggaggggggtggtatggagcaaggggcaagttgggaagacaacctgtagggcctgcggggtctattgggaaccaagctggagtgcagtggcacaatcttggctcactgcaatctccgcctcctgggttcaagcgattctcctgcctcagcctcccgagttgttgggattccaggcatgcatgaccaggctcagctaatttttgtttttttggtagagacggggtttcaccatattggccaggctggtctccaactcctaatctcaggtgatctacccaccttggcctcccaaattgctgggattacaggcgtgaaccactgctcccttccctgtccttatcgatgcctagggttaatcattaactacaaggaacccctagtgatggagttggccactccctctctgcgcgctcgctcgctcactgaggccgggcgaccaaaggtcgcccgacgcccgggctttgcccgggcggcctcagtgagcgagcgagcgcgcag

SEQ ID NO: 5157 - DNA, 2198 bp, synthetic construct
  source 1..2198: mol_type = other DNA
ctgcgcgctcgctcgctcactgaggccgcccgggcaaagcccgggcgtcgggcgacctttggtcgcccggcctcagtgagcgagcgagcgcgcagagagggagtgtagccatgctctaggaagatcaattcaattcacgcgtcgacattgattattgactagttattaatagtaatcaattacggggtcattagttcatagcccatatatggagttccgcgttacataacttacggtaaatggcccgcctggctgaccgcccaacgacccccgcccattgacgtcaataatgacgtatgttcccatagtaacgccaatagggactttccattgacgtcaatgggtggagtatttacggtaaactgcccacttggcagtacatcaagtgtatcatatgccaagtacgccccctattgacgtcaatgacggtaaatggcccgcctggcattatgcccagtacatgaccttatgggactttcctacttggcagtacatctacgtattagtcatcgctattaccatgtcgaggccacgttctgcttcactctccccatctcccccccctccccacccccaattttgtatttatttattttttaattattttgtgcagcgatgggggcggggggggggggcgcgcgccaggcggggcggggcggggcgaggggcggggcggggcgaggcggagaggtgcggcggcagccaatcagagcggcgcgctccgaaagtttccttttatggcgaggcggcggcggcggcggccctataaaaagcgaagcgcgcggcgggcgggagcaagcttcgtttagtgaaccgtcagatcgcctggagacgccatccacgctgttttgacctccatagaagacaccgggaccgatccagcctccgcggattcgaatcccggccgggaacggtgcattggaacgcggattccccgtgccaagagtgacgtaagtaccgcctatagagtctataggcccacaaaaaatgctttcttcttttaatatacttttttgtttatcttatttctaatactttccctaatctctttctttcagggcaataatgatacaatgtatcatgcctctttgcaccattctaaagaataacagtgataatttctgggttaaggcaatagcaatatttctgcatataaatatttctgcatataaattgtaactgatgtaagaggtttcatattgctaatagcagctacaatccagctaccattctgcttttattttatggttgggataaggctggattattctgagtccaagctaggcccttttgctaatcatgttcatacctcttatcttcctcccacagctcctgggcaacgtgctggtctgtgtgctggcccatcactttggcaaagaattgggattcgaaccggtgtgctgggcggggggcggcgggccctcccgcagaacaccatgcgctcttcggaacctcgcagtacggttaatccctgtgacctggtattaaccgaactgcgaggttctgtggagcgccttgacagcagccatgggagggccgccccctacctcagtgactcgaggggtggcatccctgtgacccctccccagtgcctctcctggccctggaagttgccactccagtgcccaccagccttgtcctaataaaattaagttgcatcattttgtctgactaggtgtccttctataatattatggggtggaggggggtggtatggagcaaggggcaagttgggaagacaacctgtagggcctgcggggtctattgggaaccaagctggagtgcagtggcacaatcttggctcactgcaatctccgcctcctgggttcaagcgattctcctgcctcagcctcccgagttgttgggattccaggcatgcatgaccaggctcagctaatttttgtttttttggtagagacggggtttcaccatattggccaggctggtctccaactcctaatctcaggtgatctacccaccttggcctcccaaattgctgggattacaggcgtgaaccactgctcccttccctgtccttatcgatgcctagggttaatcattaactacaaggaacccctagtgatggagttggccactccctctctgcgcgctcgctcgctcactgaggccgggcgaccaaaggtcgcccgacgcccgggctttgcccgggcggcctcagtgagcgagcgagcgcgcag

SEQ ID NO: 5158 - DNA, 2198 bp, synthetic construct
  source 1..2198: mol_type = other DNA
ctgcgcgctcgctcgctcactgaggccgcccgggcaaagcccgggcgtcgggcgacctttggtcgcccggcctcagtgagcgagcgagcgcgcagagagggagtgtagccatgctctaggaagatcaattcaattcacgcgtcgacattgattattgactagttattaatagtaatcaattacggggtcattagttcatagcccatatatggagttccgcgttacataacttacggtaaatggcccgcctggctgaccgcccaacgacccccgcccattgacgtcaataatgacgtatgttcccatagtaacgccaatagggactttccattgacgtcaatgggtggagtatttacggtaaactgcccacttggcagtacatcaagtgtatcatatgccaagtacgccccctattgacgtcaatgacggtaaatggcccgcctggcattatgcccagtacatgaccttatgggactttcctacttggcagtacatctacgtattagtcatcgctattaccatgtcgaggccacgttctgcttcactctccccatctcccccccctccccacccccaattttgtatttatttattttttaattattttgtgcagcgatgggggcggggggggggggcgcgcgccaggcggggcggggcggggcgaggggcggggcggggcgaggcggagaggtgcggcggcagccaatcagagcggcgcgctccgaaagtttccttttatggcgaggcggcggcggcggcggccctataaaaagcgaagcgcgcggcgggcgggagcaagcttcgtttagtgaaccgtcagatcgcctggagacgccatccacgctgttttgacctccatagaagacaccgggaccgatccagcctccgcggattcgaatcccggccgggaacggtgcattggaacgcggattccccgtgccaagagtgacgtaagtaccgcctatagagtctataggcccacaaaaaatgctttcttcttttaatatacttttttgtttatcttatttctaatactttccctaatctctttctttcagggcaataatgatacaatgtatcatgcctctttgcaccattctaaagaataacagtgataatttctgggttaaggcaatagcaatatttctgcatataaatatttctgcatataaattgtaactgatgtaagaggtttcatattgctaatagcagctacaatccagctaccattctgcttttattttatggttgggataaggctggattattctgagtccaagctaggcccttttgctaatcatgttcatacctcttatcttcctcccacagctcctgggcaacgtgctggtctgtgtgctggcccatcactttggcaaagaattgggattcgaaccggtgtgctgggcggggggcggcgggccctcccgcagaacaccatgcgctcttcggaagctttggctggggacttcccctgtgacctggtgaagtcccgagccaaagcttctgtggagcgccttgacagcagccatgggagggccgccccctacctcagtgactcgaggggtggcatccctgtgacccctccccagtgcctctcctggccctggaagttgccactccagtgcccaccagccttgtcctaataaaattaagttgcatcattttgtctgactaggtgtccttctataatattatggggtggaggggggtggtatggagcaaggggcaagttgggaagacaacctgtagggcctgcggggtctattgggaaccaagctggagtgcagtggcacaatcttggctcactgcaatctccgcctcctgggttcaagcgattctcctgcctcagcctcccgagttgttgggattccaggcatgcatgaccaggctcagctaatttttgtttttttggtagagacggggtttcaccatattggccaggctggtctccaactcctaatctcaggtgatctacccaccttggcctcccaaattgctgggattacaggcgtgaaccactgctcccttccctgtccttatcgatgcctagggttaatcattaactacaaggaacccctagtgatggagttggccactccctctctgcgcgctcgctcgctcactgaggccgggcgaccaaaggtcgcccgacgcccgggctttgcccgggcggcctcagtgagcgagcgagcgcgcag

SEQ ID NO: 5159 - DNA, 2198 bp, synthetic construct
  source 1..2198: mol_type = other DNA
ctgcgcgctcgctcgctcactgaggccgcccgggcaaagcccgggcgtcgggcgacctttggtcgcccggcctcagtgagcgagcgagcgcgcagagagggagtgtagccatgctctaggaagatcaattcaattcacgcgtcgacattgattattgactagttattaatagtaatcaattacggggtcattagttcatagcccatatatggagttccgcgttacataacttacggtaaatggcccgcctggctgaccgcccaacgacccccgcccattgacgtcaataatgacgtatgttcccatagtaacgccaatagggactttccattgacgtcaatgggtggagtatttacggtaaactgcccacttggcagtacatcaagtgtatcatatgccaagtacgccccctattgacgtcaatgacggtaaatggcccgcctggcattatgcccagtacatgaccttatgggactttcctacttggcagtacatctacgtattagtcatcgctattaccatgtcgaggccacgttctgcttcactctccccatctcccccccctccccacccccaattttgtatttatttattttttaattattttgtgcagcgatgggggcggggggggggggcgcgcgccaggcggggcggggcggggcgaggggcggggcggggcgaggcggagaggtgcggcggcagccaatcagagcggcgcgctccgaaagtttccttttatggcgaggcggcggcggcggcggccctataaaaagcgaagcgcgcggcgggcgggagcaagcttcgtttagtgaaccgtcagatcgcctggagacgccatccacgctgttttgacctccatagaagacaccgggaccgatccagcctccgcggattcgaatcccggccgggaacggtgcattggaacgcggattccccgtgccaagagtgacgtaagtaccgcctatagagtctataggcccacaaaaaatgctttcttcttttaatatacttttttgtttatcttatttctaatactttccctaatctctttctttcagggcaataatgatacaatgtatcatgcctctttgcaccattctaaagaataacagtgataatttctgggttaaggcaatagcaatatttctgcatataaatatttctgcatataaattgtaactgatgtaagaggtttcatattgctaatagcagctacaatccagctaccattctgcttttattttatggttgggataaggctggattattctgagtccaagctaggcccttttgctaatcatgttcatacctcttatcttcctcccacagctcctgggcaacgtgctggtctgtgtgctggcccatcactttggcaaagaattgggattcgaaccggtgtgctgggcggggggcggcgggccctcccgcagaacaccatgcgctcttcggaaagctgacctaccgcgagaccctgtgacctggttctcgcggaaggtcagctttctgtggagcgccttgacagcagccatgggagggccgccccctacctcagtgactcgaggggtggcatccctgtgacccctccccagtgcctctcctggccctggaagttgccactccagtgcccaccagccttgtcctaataaaattaagttgcatcattttgtctgactaggtgtccttctataatattatggggtggaggggggtggtatggagcaaggggcaagttgggaagacaacctgtagggcctgcggggtctattgggaaccaagctggagtgcagtggcacaatcttggctcactgcaatctccgcctcctgggttcaagcgattctcctgcctcagcctcccgagttgttgggattccaggcatgcatgaccaggctcagctaatttttgtttttttggtagagacggggtttcaccatattggccaggctggtctccaactcctaatctcaggtgatctacccaccttggcctcccaaattgctgggattacaggcgtgaaccactgctcccttccctgtccttatcgatgcctagggttaatcattaactacaaggaacccctagtgatggagttggccactccctctctgcgcgctcgctcgctcactgaggccgggcgaccaaaggtcgcccgacgcccgggctttgcccgggcggcctcagtgagcgagcgagcgcgcag

SEQ ID NO: 5160 - DNA, 2198 bp, synthetic construct
  source 1..2198: mol_type = other DNA
ctgcgcgctcgctcgctcactgaggccgcccgggcaaagcccgggcgtcgggcgacctttggtcgcccggcctcagtgagcgagcgagcgcgcagagagggagtgtagccatgctctaggaagatcaattcaattcacgcgtcgacattgattattgactagttattaatagtaatcaattacggggtcattagttcatagcccatatatggagttccgcgttacataacttacggtaaatggcccgcctggctgaccgcccaacgacccccgcccattgacgtcaataatgacgtatgttcccatagtaacgccaatagggactttccattgacgtcaatgggtggagtatttacggtaaactgcccacttggcagtacatcaagtgtatcatatgccaagtacgccccctattgacgtcaatgacggtaaatggcccgcctggcattatgcccagtacatgaccttatgggactttcctacttggcagtacatctacgtattagtcatcgctattaccatgtcgaggccacgttctgcttcactctccccatctcccccccctccccacccccaattttgtatttatttattttttaattattttgtgcagcgatgggggcggggggggggggcgcgcgccaggcggggcggggcggggcgaggggcggggcggggcgaggcggagaggtgcggcggcagccaatcagagcggcgcgctccgaaagtttccttttatggcgaggcggcggcggcggcggccctataaaaagcgaagcgcgcggcgggcgggagcaagcttcgtttagtgaaccgtcagatcgcctggagacgccatccacgctgttttgacctccatagaagacaccgggaccgatccagcctccgcggattcgaatcccggccgggaacggtgcattggaacgcggattccccgtgccaagagtgacgtaagtaccgcctatagagtctataggcccacaaaaaatgctttcttcttttaatatacttttttgtttatcttatttctaatactttccctaatctctttctttcagggcaataatgatacaatgtatcatgcctctttgcaccattctaaagaataacagtgataatttctgggttaaggcaatagcaatatttctgcatataaatatttctgcatataaattgtaactgatgtaagaggtttcatattgctaatagcagctacaatccagctaccattctgcttttattttatggttgggataaggctggattattctgagtccaagctaggcccttttgctaatcatgttcatacctcttatcttcctcccacagctcctgggcaacgtgctggtctgtgtgctggcccatcactttggcaaagaattgggattcgaaccggtgtgctgggcggggggcggcgggccctcccgcagaacaccatgcgctcttcggaagccgtcttcggccaagagccctgtgacctggtctcttggcggaagacggcttctgtggagcgccttgacagcagccatgggagggccgccccctacctcagtgactcgaggggtggcatccctgtgacccctccccagtgcctctcctggccctggaagttgccactccagtgcccaccagccttgtcctaataaaattaagttgcatcattttgtctgactaggtgtccttctataatattatggggtggaggggggtggtatggagcaaggggcaagttgggaagacaacctgtagggcctgcggggtctattgggaaccaagctggagtgcagtggcacaatcttggctcactgcaatctccgcctcctgggttcaagcgattctcctgcctcagcctcccgagttgttgggattccaggcatgcatgaccaggctcagctaatttttgtttttttggtagagacggggtttcaccatattggccaggctggtctccaactcctaatctcaggtgatctacccaccttggcctcccaaattgctgggattacaggcgtgaaccactgctcccttccctgtccttatcgatgcctagggttaatcattaactacaaggaacccctagtgatggagttggccactccctctctgcgcgctcgctcgctcactgaggccgggcgaccaaaggtcgcccgacgcccgggctttgcccgggcggcctcagtgagcgagcgagcgcgcag

SEQ ID NO: 5161 - DNA, 2198 bp, synthetic construct
  source 1..2198: mol_type = other DNA
ctgcgcgctcgctcgctcactgaggccgcccgggcaaagcccgggcgtcgggcgacctttggtcgcccggcctcagtgagcgagcgagcgcgcagagagggagtgtagccatgctctaggaagatcaattcaattcacgcgtcgacattgattattgactagttattaatagtaatcaattacggggtcattagttcatagcccatatatggagttccgcgttacataacttacggtaaatggcccgcctggctgaccgcccaacgacccccgcccattgacgtcaataatgacgtatgttcccatagtaacgccaatagggactttccattgacgtcaatgggtggagtatttacggtaaactgcccacttggcagtacatcaagtgtatcatatgccaagtacgccccctattgacgtcaatgacggtaaatggcccgcctggcattatgcccagtacatgaccttatgggactttcctacttggcagtacatctacgtattagtcatcgctattaccatgtcgaggccacgttctgcttcactctccccatctcccccccctccccacccccaattttgtatttatttattttttaattattttgtgcagcgatgggggcggggggggggggcgcgcgccaggcggggcggggcggggcgaggggcggggcggggcgaggcggagaggtgcggcggcagccaatcagagcggcgcgctccgaaagtttccttttatggcgaggcggcggcggcggcggccctataaaaagcgaagcgcgcggcgggcgggagcaagcttcgtttagtgaaccgtcagatcgcctggagacgccatccacgctgttttgacctccatagaagacaccgggaccgatccagcctccgcggattcgaatcccggccgggaacggtgcattggaacgcggattccccgtgccaagagtgacgtaagtaccgcctatagagtctataggcccacaaaaaatgctttcttcttttaatatacttttttgtttatcttatttctaatactttccctaatctctttctttcagggcaataatgatacaatgtatcatgcctctttgcaccattctaaagaataacagtgataatttctgggttaaggcaatagcaatatttctgcatataaatatttctgcatataaattgtaactgatgtaagaggtttcatattgctaatagcagctacaatccagctaccattctgcttttattttatggttgggataaggctggattattctgagtccaagctaggcccttttgctaatcatgttcatacctcttatcttcctcccacagctcctgggcaacgtgctggtctgtgtgctggcccatcactttggcaaagaattgggattcgaaccggtgtgctgggcggggggcggcgggccctcccgcagaacaccatgcgctcttcggaacctcgcagttcggttaattcctgtgatttggtattaaccgaactgcgaggttctgaggagcgccttgacagcagccatgggagggccgccccctacctcagtgactcgaggggtggcatccctgtgacccctccccagtgcctctcctggccctggaagttgccactccagtgcccaccagccttgtcctaataaaattaagttgcatcattttgtctgactaggtgtccttctataatattatggggtggaggggggtggtatggagcaaggggcaagttgggaagacaacctgtagggcctgcggggtctattgggaaccaagctggagtgcagtggcacaatcttggctcactgcaatctccgcctcctgggttcaagcgattctcctgcctcagcctcccgagttgttgggattccaggcatgcatgaccaggctcagctaatttttgtttttttggtagagacggggtttcaccatattggccaggctggtctccaactcctaatctcaggtgatctacccaccttggcctcccaaattgctgggattacaggcgtgaaccactgctcccttccctgtccttatcgatgcctagggttaatcattaactacaaggaacccctagtgatggagttggccactccctctctgcgcgctcgctcgctcactgaggccgggcgaccaaaggtcgcccgacgcccgggctttgcccgggcggcctcagtgagcgagcgagcgcgcag

SEQ ID NO: 5162 - DNA, 2198 bp, synthetic construct
  source 1..2198: mol_type = other DNA
ctgcgcgctcgctcgctcactgaggccgcccgggcaaagcccgggcgtcgggcgacctttggtcgcccggcctcagtgagcgagcgagcgcgcagagagggagtgtagccatgctctaggaagatcaattcaattcacgcgtcgacattgattattgactagttattaatagtaatcaattacggggtcattagttcatagcccatatatggagttccgcgttacataacttacggtaaatggcccgcctggctgaccgcccaacgacccccgcccattgacgtcaataatgacgtatgttcccatagtaacgccaatagggactttccattgacgtcaatgggtggagtatttacggtaaactgcccacttggcagtacatcaagtgtatcatatgccaagtacgccccctattgacgtcaatgacggtaaatggcccgcctggcattatgcccagtacatgaccttatgggactttcctacttggcagtacatctacgtattagtcatcgctattaccatgtcgaggccacgttctgcttcactctccccatctcccccccctccccacccccaattttgtatttatttattttttaattattttgtgcagcgatgggggcggggggggggggcgcgcgccaggcggggcggggcggggcgaggggcggggcggggcgaggcggagaggtgcggcggcagccaatcagagcggcgcgctccgaaagtttccttttatggcgaggcggcggcggcggcggccctataaaaagcgaagcgcgcggcgggcgggagcaagcttcgtttagtgaaccgtcagatcgcctggagacgccatccacgctgttttgacctccatagaagacaccgggaccgatccagcctccgcggattcgaatcccggccgggaacggtgcattggaacgcggattccccgtgccaagagtgacgtaagtaccgcctatagagtctataggcccacaaaaaatgctttcttcttttaatatacttttttgtttatcttatttctaatactttccctaatctctttctttcagggcaataatgatacaatgtatcatgcctctttgcaccattctaaagaataacagtgataatttctgggttaaggcaatagcaatatttctgcatataaatatttctgcatataaattgtaactgatgtaagaggtttcatattgctaatagcagctacaatccagctaccattctgcttttattttatggttgggataaggctggattattctgagtccaagctaggcccttttgctaatcatgttcatacctcttatcttcctcccacagctcctgggcaacgtgctggtctgtgtgctggcccatcactttggcaaagaattgggattcgaaccggtgtgctgggcggggggcggcgggccctcccgcagaacaccatgcgctcttcggaagctttggctcgggacttctcctgtgatttggtgaagtcccgagccaaagcttctgaggagcgccttgacagcagccatgggagggccgccccctacctcagtgactcgaggggtggcatccctgtgacccctccccagtgcctctcctggccctggaagttgccactccagtgcccaccagccttgtcctaataaaattaagttgcatcattttgtctgactaggtgtccttctataatattatggggtggaggggggtggtatggagcaaggggcaagttgggaagacaacctgtagggcctgcggggtctattgggaaccaagctggagtgcagtggcacaatcttggctcactgcaatctccgcctcctgggttcaagcgattctcctgcctcagcctcccgagttgttgggattccaggcatgcatgaccaggctcagctaatttttgtttttttggtagagacggggtttcaccatattggccaggctggtctccaactcctaatctcaggtgatctacccaccttggcctcccaaattgctgggattacaggcgtgaaccactgctcccttccctgtccttatcgatgcctagggttaatcattaactacaaggaacccctagtgatggagttggccactccctctctgcgcgctcgctcgctcactgaggccgggcgaccaaaggtcgcccgacgcccgggctttgcccgggcggcctcagtgagcgagcgagcgcgcag

SEQ ID NO: 5163 - DNA, 2198 bp, synthetic construct
  source 1..2198: mol_type = other DNA
ctgcgcgctcgctcgctcactgaggccgcccgggcaaagcccgggcgtcgggcgacctttggtcgcccggcctcagtgagcgagcgagcgcgcagagagggagtgtagccatgctctaggaagatcaattcaattcacgcgtcgacattgattattgactagttattaatagtaatcaattacggggtcattagttcatagcccatatatggagttccgcgttacataacttacggtaaatggcccgcctggctgaccgcccaacgacccccgcccattgacgtcaataatgacgtatgttcccatagtaacgccaatagggactttccattgacgtcaatgggtggagtatttacggtaaactgcccacttggcagtacatcaagtgtatcatatgccaagtacgccccctattgacgtcaatgacggtaaatggcccgcctggcattatgcccagtacatgaccttatgggactttcctacttggcagtacatctacgtattagtcatcgctattaccatgtcgaggccacgttctgcttcactctccccatctcccccccctccccacccccaattttgtatttatttattttttaattattttgtgcagcgatgggggcggggggggggggcgcgcgccaggcggggcggggcggggcgaggggcggggcggggcgaggcggagaggtgcggcggcagccaatcagagcggcgcgctccgaaagtttccttttatggcgaggcggcggcggcggcggccctataaaaagcgaagcgcgcggcgggcgggagcaagcttcgtttagtgaaccgtcagatcgcctggagacgccatccacgctgttttgacctccatagaagacaccgggaccgatccagcctccgcggattcgaatcccggccgggaacggtgcattggaacgcggattccccgtgccaagagtgacgtaagtaccgcctatagagtctataggcccacaaaaaatgctttcttcttttaatatacttttttgtttatcttatttctaatactttccctaatctctttctttcagggcaataatgatacaatgtatcatgcctctttgcaccattctaaagaataacagtgataatttctgggttaaggcaatagcaatatttctgcatataaatatttctgcatataaattgtaactgatgtaagaggtttcatattgctaatagcagctacaatccagctaccattctgcttttattttatggttgggataaggctggattattctgagtccaagctaggcccttttgctaatcatgttcatacctcttatcttcctcccacagctcctgggcaacgtgctggtctgtgtgctggcccatcactttggcaaagaattgggattcgaaccggtgtgctgggcggggggcggcgggccctcccgcagaacaccatgcgctcttcggaaagctgaccttccgcgagatcctgtgatttggttctcgcggaaggtcagctttctgaggagcgccttgacagcagccatgggagggccgccccctacctcagtgactcgaggggtggcatccctgtgacccctccccagtgcctctcctggccctggaagttgccactccagtgcccaccagccttgtcctaataaaattaagttgcatcattttgtctgactaggtgtccttctataatattatggggtggaggggggtggtatggagcaaggggcaagttgggaagacaacctgtagggcctgcggggtctattgggaaccaagctggagtgcagtggcacaatcttggctcactgcaatctccgcctcctgggttcaagcgattctcctgcctcagcctcccgagttgttgggattccaggcatgcatgaccaggctcagctaatttttgtttttttggtagagacggggtttcaccatattggccaggctggtctccaactcctaatctcaggtgatctacccaccttggcctcccaaattgctgggattacaggcgtgaaccactgctcccttccctgtccttatcgatgcctagggttaatcattaactacaaggaacccctagtgatggagttggccactccctctctgcgcgctcgctcgctcactgaggccgggcgaccaaaggtcgcccgacgcccgggctttgcccgggcggcctcagtgagcgagcgagcgcgcag

SEQ ID NO: 5164 - DNA, 2198 bp, synthetic construct
  source 1..2198: mol_type = other DNA
ctgcgcgctcgctcgctcactgaggccgcccgggcaaagcccgggcgtcgggcgacctttggtcgcccggcctcagtgagcgagcgagcgcgcagagagggagtgtagccatgctctaggaagatcaattcaattcacgcgtcgacattgattattgactagttattaatagtaatcaattacggggtcattagttcatagcccatatatggagttccgcgttacataacttacggtaaatggcccgcctggctgaccgcccaacgacccccgcccattgacgtcaataatgacgtatgttcccatagtaacgccaatagggactttccattgacgtcaatgggtggagtatttacggtaaactgcccacttggcagtacatcaagtgtatcatatgccaagtacgccccctattgacgtcaatgacggtaaatggcccgcctggcattatgcccagtacatgaccttatgggactttcctacttggcagtacatctacgtattagtcatcgctattaccatgtcgaggccacgttctgcttcactctccccatctcccccccctccccacccccaattttgtatttatttattttttaattattttgtgcagcgatgggggcggggggggggggcgcgcgccaggcggggcggggcggggcgaggggcggggcggggcgaggcggagaggtgcggcggcagccaatcagagcggcgcgctccgaaagtttccttttatggcgaggcggcggcggcggcggccctataaaaagcgaagcgcgcggcgggcgggagcaagcttcgtttagtgaaccgtcagatcgcctggagacgccatccacgctgttttgacctccatagaagacaccgggaccgatccagcctccgcggattcgaatcccggccgggaacggtgcattggaacgcggattccccgtgccaagagtgacgtaagtaccgcctatagagtctataggcccacaaaaaatgctttcttcttttaatatacttttttgtttatcttatttctaatactttccctaatctctttctttcagggcaataatgatacaatgtatcatgcctctttgcaccattctaaagaataacagtgataatttctgggttaaggcaatagcaatatttctgcatataaatatttctgcatataaattgtaactgatgtaagaggtttcatattgctaatagcagctacaatccagctaccattctgcttttattttatggttgggataaggctggattattctgagtccaagctaggcccttttgctaatcatgttcatacctcttatcttcctcccacagctcctgggcaacgtgctggtctgtgtgctggcccatcactttggcaaagaattgggattcgaaccggtgtgctgggcggggggcggcgggccctcccgcagaacaccatgcgctcttcggaagccgtcttccgccaagagtcctgtgatttggtctcttggcggaagacggcttctgaggagcgccttgacagcagccatgggagggccgccccctacctcagtgactcgaggggtggcatccctgtgacccctccccagtgcctctcctggccctggaagttgccactccagtgcccaccagccttgtcctaataaaattaagttgcatcattttgtctgactaggtgtccttctataatattatggggtggaggggggtggtatggagcaaggggcaagttgggaagacaacctgtagggcctgcggggtctattgggaaccaagctggagtgcagtggcacaatcttggctcactgcaatctccgcctcctgggttcaagcgattctcctgcctcagcctcccgagttgttgggattccaggcatgcatgaccaggctcagctaatttttgtttttttggtagagacggggtttcaccatattggccaggctggtctccaactcctaatctcaggtgatctacccaccttggcctcccaaattgctgggattacaggcgtgaaccactgctcccttccctgtccttatcgatgcctagggttaatcattaactacaaggaacccctagtgatggagttggccactccctctctgcgcgctcgctcgctcactgaggccgggcgaccaaaggtcgcccgacgcccgggctttgcccgggcggcctcagtgagcgagcgagcgcgcag

SEQ ID NO: 5165 - DNA, 2198 bp, synthetic construct
  source 1..2198: mol_type = other DNA
ctgcgcgctcgctcgctcactgaggccgcccgggcaaagcccgggcgtcgggcgacctttggtcgcccggcctcagtgagcgagcgagcgcgcagagagggagtgtagccatgctctaggaagatcaattcaattcacgcgtcgacattgattattgactagttattaatagtaatcaattacggggtcattagttcatagcccatatatggagttccgcgttacataacttacggtaaatggcccgcctggctgaccgcccaacgacccccgcccattgacgtcaataatgacgtatgttcccatagtaacgccaatagggactttccattgacgtcaatgggtggagtatttacggtaaactgcccacttggcagtacatcaagtgtatcatatgccaagtacgccccctattgacgtcaatgacggtaaatggcccgcctggcattatgcccagtacatgaccttatgggactttcctacttggcagtacatctacgtattagtcatcgctattaccatgtcgaggccacgttctgcttcactctccccatctcccccccctccccacccccaattttgtatttatttattttttaattattttgtgcagcgatgggggcggggggggggggcgcgcgccaggcggggcggggcggggcgaggggcggggcggggcgaggcggagaggtgcggcggcagccaatcagagcggcgcgctccgaaagtttccttttatggcgaggcggcggcggcggcggccctataaaaagcgaagcgcgcggcgggcgggagcaagcttcgtttagtgaaccgtcagatcgcctggagacgccatccacgctgttttgacctccatagaagacaccgggaccgatccagcctccgcggattcgaatcccggccgggaacggtgcattggaacgcggattccccgtgccaagagtgacgtaagtaccgcctatagagtctataggcccacaaaaaatgctttcttcttttaatatacttttttgtttatcttatttctaatactttccctaatctctttctttcagggcaataatgatacaatgtatcatgcctctttgcaccattctaaagaataacagtgataatttctgggttaaggcaatagcaatatttctgcatataaatatttctgcatataaattgtaactgatgtaagaggtttcatattgctaatagcagctacaatccagctaccattctgcttttattttatggttgggataaggctggattattctgagtccaagctaggcccttttgctaatcatgttcatacctcttatcttcctcccacagctcctgggcaacgtgctggtctgtgtgctggcccatcactttggcaaagaattgggattcgaaccggtgtgctgggcggggggcggcgggccctcccgcagaacaccatgcgctcttcggaacctcgcagttcggttaatacctgtgacctggtattaaccgaactgcgaggttctgaggagcgccttgacagcagccatgggagggccgccccctacctcagtgactcgaggggtggcatccctgtgacccctccccagtgcctctcctggccctggaagttgccactccagtgcccaccagccttgtcctaataaaattaagttgcatcattttgtctgactaggtgtccttctataatattatggggtggaggggggtggtatggagcaaggggcaagttgggaagacaacctgtagggcctgcggggtctattgggaaccaagctggagtgcagtggcacaatcttggctcactgcaatctccgcctcctgggttcaagcgattctcctgcctcagcctcccgagttgttgggattccaggcatgcatgaccaggctcagctaatttttgtttttttggtagagacggggtttcaccatattggccaggctggtctccaactcctaatctcaggtgatctacccaccttggcctcccaaattgctgggattacaggcgtgaaccactgctcccttccctgtccttatcgatgcctagggttaatcattaactacaaggaacccctagtgatggagttggccactccctctctgcgcgctcgctcgctcactgaggccgggcgaccaaaggtcgcccgacgcccgggctttgcccgggcggcctcagtgagcgagcgagcgcgcag

SEQ ID NO: 5166 - DNA, 2198 bp, synthetic construct
  source 1..2198: mol_type = other DNA
ctgcgcgctcgctcgctcactgaggccgcccgggcaaagcccgggcgtcgggcgacctttggtcgcccggcctcagtgagcgagcgagcgcgcagagagggagtgtagccatgctctaggaagatcaattcaattcacgcgtcgacattgattattgactagttattaatagtaatcaattacggggtcattagttcatagcccatatatggagttccgcgttacataacttacggtaaatggcccgcctggctgaccgcccaacgacccccgcccattgacgtcaataatgacgtatgttcccatagtaacgccaatagggactttccattgacgtcaatgggtggagtatttacggtaaactgcccacttggcagtacatcaagtgtatcatatgccaagtacgccccctattgacgtcaatgacggtaaatggcccgcctggcattatgcccagtacatgaccttatgggactttcctacttggcagtacatctacgtattagtcatcgctattaccatgtcgaggccacgttctgcttcactctccccatctcccccccctccccacccccaattttgtatttatttattttttaattattttgtgcagcgatgggggcggggggggggggcgcgcgccaggcggggcggggcggggcgaggggcggggcggggcgaggcggagaggtgcggcggcagccaatcagagcggcgcgctccgaaagtttccttttatggcgaggcggcggcggcggcggccctataaaaagcgaagcgcgcggcgggcgggagcaagcttcgtttagtgaaccgtcagatcgcctggagacgccatccacgctgttttgacctccatagaagacaccgggaccgatccagcctccgcggattcgaatcccggccgggaacggtgcattggaacgcggattccccgtgccaagagtgacgtaagtaccgcctatagagtctataggcccacaaaaaatgctttcttcttttaatatacttttttgtttatcttatttctaatactttccctaatctctttctttcagggcaataatgatacaatgtatcatgcctctttgcaccattctaaagaataacagtgataatttctgggttaaggcaatagcaatatttctgcatataaatatttctgcatataaattgtaactgatgtaagaggtttcatattgctaatagcagctacaatccagctaccattctgcttttattttatggttgggataaggctggattattctgagtccaagctaggcccttttgctaatcatgttcatacctcttatcttcctcccacagctcctgggcaacgtgctggtctgtgtgctggcccatcactttggcaaagaattgggattcgaaccggtgtgctgggcggggggcggcgggccctcccgcagaacaccatgcgctcttcggaagctttggctcgggacttcacctgtgacctggtgaagtcccgagccaaagcttctgaggagcgccttgacagcagccatgggagggccgccccctacctcagtgactcgaggggtggcatccctgtgacccctccccagtgcctctcctggccctggaagttgccactccagtgcccaccagccttgtcctaataaaattaagttgcatcattttgtctgactaggtgtccttctataatattatggggtggaggggggtggtatggagcaaggggcaagttgggaagacaacctgtagggcctgcggggtctattgggaaccaagctggagtgcagtggcacaatcttggctcactgcaatctccgcctcctgggttcaagcgattctcctgcctcagcctcccgagttgttgggattccaggcatgcatgaccaggctcagctaatttttgtttttttggtagagacggggtttcaccatattggccaggctggtctccaactcctaatctcaggtgatctacccaccttggcctcccaaattgctgggattacaggcgtgaaccactgctcccttccctgtccttatcgatgcctagggttaatcattaactacaaggaacccctagtgatggagttggccactccctctctgcgcgctcgctcgctcactgaggccgggcgaccaaaggtcgcccgacgcccgggctttgcccgggcggcctcagtgagcgagcgagcgcgcag

SEQ ID NO: 5167 - DNA, 2198 bp, synthetic construct
  source 1..2198: mol_type = other DNA
ctgcgcgctcgctcgctcactgaggccgcccgggcaaagcccgggcgtcgggcgacctttggtcgcccggcctcagtgagcgagcgagcgcgcagagagggagtgtagccatgctctaggaagatcaattcaattcacgcgtcgacattgattattgactagttattaatagtaatcaattacggggtcattagttcatagcccatatatggagttccgcgttacataacttacggtaaatggcccgcctggctgaccgcccaacgacccccgcccattgacgtcaataatgacgtatgttcccatagtaacgccaatagggactttccattgacgtcaatgggtggagtatttacggtaaactgcccacttggcagtacatcaagtgtatcatatgccaagtacgccccctattgacgtcaatgacggtaaatggcccgcctggcattatgcccagtacatgaccttatgggactttcctacttggcagtacatctacgtattagtcatcgctattaccatgtcgaggccacgttctgcttcactctccccatctcccccccctccccacccccaattttgtatttatttattttttaattattttgtgcagcgatgggggcggggggggggggcgcgcgccaggcggggcggggcggggcgaggggcggggcggggcgaggcggagaggtgcggcggcagccaatcagagcggcgcgctccgaaagtttccttttatggcgaggcggcggcggcggcggccctataaaaagcgaagcgcgcggcgggcgggagcaagcttcgtttagtgaaccgtcagatcgcctggagacgccatccacgctgttttgacctccatagaagacaccgggaccgatccagcctccgcggattcgaatcccggccgggaacggtgcattggaacgcggattccccgtgccaagagtgacgtaagtaccgcctatagagtctataggcccacaaaaaatgctttcttcttttaatatacttttttgtttatcttatttctaatactttccctaatctctttctttcagggcaataatgatacaatgtatcatgcctctttgcaccattctaaagaataacagtgataatttctgggttaaggcaatagcaatatttctgcatataaatatttctgcatataaattgtaactgatgtaagaggtttcatattgctaatagcagctacaatccagctaccattctgcttttattttatggttgggataaggctggattattctgagtccaagctaggcccttttgctaatcatgttcatacctcttatcttcctcccacagctcctgggcaacgtgctggtctgtgtgctggcccatcactttggcaaagaattgggattcgaaccggtgtgctgggcggggggcggcgggccctcccgcagaacaccatgcgctcttcggaaagctgaccttccgcgagaacctgtgacctggttctcgcggaaggtcagctttctgaggagcgccttgacagcagccatgggagggccgccccctacctcagtgactcgaggggtggcatccctgtgacccctccccagtgcctctcctggccctggaagttgccactccagtgcccaccagccttgtcctaataaaattaagttgcatcattttgtctgactaggtgtccttctataatattatggggtggaggggggtggtatggagcaaggggcaagttgggaagacaacctgtagggcctgcggggtctattgggaaccaagctggagtgcagtggcacaatcttggctcactgcaatctccgcctcctgggttcaagcgattctcctgcctcagcctcccgagttgttgggattccaggcatgcatgaccaggctcagctaatttttgtttttttggtagagacggggtttcaccatattggccaggctggtctccaactcctaatctcaggtgatctacccaccttggcctcccaaattgctgggattacaggcgtgaaccactgctcccttccctgtccttatcgatgcctagggttaatcattaactacaaggaacccctagtgatggagttggccactccctctctgcgcgctcgctcgctcactgaggccgggcgaccaaaggtcgcccgacgcccgggctttgcccgggcggcctcagtgagcgagcgagcgcgcag

SEQ ID NO: 5168 - DNA, 2198 bp, synthetic construct
  source 1..2198: mol_type = other DNA
ctgcgcgctcgctcgctcactgaggccgcccgggcaaagcccgggcgtcgggcgacctttggtcgcccggcctcagtgagcgagcgagcgcgcagagagggagtgtagccatgctctaggaagatcaattcaattcacgcgtcgacattgattattgactagttattaatagtaatcaattacggggtcattagttcatagcccatatatggagttccgcgttacataacttacggtaaatggcccgcctggctgaccgcccaacgacccccgcccattgacgtcaataatgacgtatgttcccatagtaacgccaatagggactttccattgacgtcaatgggtggagtatttacggtaaactgcccacttggcagtacatcaagtgtatcatatgccaagtacgccccctattgacgtcaatgacggtaaatggcccgcctggcattatgcccagtacatgaccttatgggactttcctacttggcagtacatctacgtattagtcatcgctattaccatgtcgaggccacgttctgcttcactctccccatctcccccccctccccacccccaattttgtatttatttattttttaattattttgtgcagcgatgggggcggggggggggggcgcgcgccaggcggggcggggcggggcgaggggcggggcggggcgaggcggagaggtgcggcggcagccaatcagagcggcgcgctccgaaagtttccttttatggcgaggcggcggcggcggcggccctataaaaagcgaagcgcgcggcgggcgggagcaagcttcgtttagtgaaccgtcagatcgcctggagacgccatccacgctgttttgacctccatagaagacaccgggaccgatccagcctccgcggattcgaatcccggccgggaacggtgcattggaacgcggattccccgtgccaagagtgacgtaagtaccgcctatagagtctataggcccacaaaaaatgctttcttcttttaatatacttttttgtttatcttatttctaatactttccctaatctctttctttcagggcaataatgatacaatgtatcatgcctctttgcaccattctaaagaataacagtgataatttctgggttaaggcaatagcaatatttctgcatataaatatttctgcatataaattgtaactgatgtaagaggtttcatattgctaatagcagctacaatccagctaccattctgcttttattttatggttgggataaggctggattattctgagtccaagctaggcccttttgctaatcatgttcatacctcttatcttcctcccacagctcctgggcaacgtgctggtctgtgtgctggcccatcactttggcaaagaattgggattcgaaccggtgtgctgggcggggggcggcgggccctcccgcagaacaccatgcgctcttcggaagccgtcttccgccaagagacctgtgacctggtctcttggcggaagacggcttctgaggagcgccttgacagcagccatgggagggccgccccctacctcagtgactcgaggggtggcatccctgtgacccctccccagtgcctctcctggccctggaagttgccactccagtgcccaccagccttgtcctaataaaattaagttgcatcattttgtctgactaggtgtccttctataatattatggggtggaggggggtggtatggagcaaggggcaagttgggaagacaacctgtagggcctgcggggtctattgggaaccaagctggagtgcagtggcacaatcttggctcactgcaatctccgcctcctgggttcaagcgattctcctgcctcagcctcccgagttgttgggattccaggcatgcatgaccaggctcagctaatttttgtttttttggtagagacggggtttcaccatattggccaggctggtctccaactcctaatctcaggtgatctacccaccttggcctcccaaattgctgggattacaggcgtgaaccactgctcccttccctgtccttatcgatgcctagggttaatcattaactacaaggaacccctagtgatggagttggccactccctctctgcgcgctcgctcgctcactgaggccgggcgaccaaaggtcgcccgacgcccgggctttgcccgggcggcctcagtgagcgagcgagcgcgcag

SEQ ID NO: 5169 - DNA, 2198 bp, synthetic construct
  source 1..2198: mol_type = other DNA
ctgcgcgctcgctcgctcactgaggccgcccgggcaaagcccgggcgtcgggcgacctttggtcgcccggcctcagtgagcgagcgagcgcgcagagagggagtgtagccatgctctaggaagatcaattcaattcacgcgtcgacattgattattgactagttattaatagtaatcaattacggggtcattagttcatagcccatatatggagttccgcgttacataacttacggtaaatggcccgcctggctgaccgcccaacgacccccgcccattgacgtcaataatgacgtatgttcccatagtaacgccaatagggactttccattgacgtcaatgggtggagtatttacggtaaactgcccacttggcagtacatcaagtgtatcatatgccaagtacgccccctattgacgtcaatgacggtaaatggcccgcctggcattatgcccagtacatgaccttatgggactttcctacttggcagtacatctacgtattagtcatcgctattaccatgtcgaggccacgttctgcttcactctccccatctcccccccctccccacccccaattttgtatttatttattttttaattattttgtgcagcgatgggggcggggggggggggcgcgcgccaggcggggcggggcggggcgaggggcggggcggggcgaggcggagaggtgcggcggcagccaatcagagcggcgcgctccgaaagtttccttttatggcgaggcggcggcggcggcggccctataaaaagcgaagcgcgcggcgggcgggagcaagcttcgtttagtgaaccgtcagatcgcctggagacgccatccacgctgttttgacctccatagaagacaccgggaccgatccagcctccgcggattcgaatcccggccgggaacggtgcattggaacgcggattccccgtgccaagagtgacgtaagtaccgcctatagagtctataggcccacaaaaaatgctttcttcttttaatatacttttttgtttatcttatttctaatactttccctaatctctttctttcagggcaataatgatacaatgtatcatgcctctttgcaccattctaaagaataacagtgataatttctgggttaaggcaatagcaatatttctgcatataaatatttctgcatataaattgtaactgatgtaagaggtttcatattgctaatagcagctacaatccagctaccattctgcttttattttatggttgggataaggctggattattctgagtccaagctaggcccttttgctaatcatgttcatacctcttatcttcctcccacagctcctgggcaacgtgctggtctgtgtgctggcccatcactttggcaaagaattgggattcgaaccggtgtgctgggcggggggcggcgggccctcccgcagaacaccatgcgctcttcggaacctcgcagttcggttaatccctgtgacctggtattaaccgaactgcgaggttctgaggagcgccttgacagcagccatgggagggccgccccctacctcagtgactcgaggggtggcatccctgtgacccctccccagtgcctctcctggccctggaagttgccactccagtgcccaccagccttgtcctaataaaattaagttgcatcattttgtctgactaggtgtccttctataatattatggggtggaggggggtggtatggagcaaggggcaagttgggaagacaacctgtagggcctgcggggtctattgggaaccaagctggagtgcagtggcacaatcttggctcactgcaatctccgcctcctgggttcaagcgattctcctgcctcagcctcccgagttgttgggattccaggcatgcatgaccaggctcagctaatttttgtttttttggtagagacggggtttcaccatattggccaggctggtctccaactcctaatctcaggtgatctacccaccttggcctcccaaattgctgggattacaggcgtgaaccactgctcccttccctgtccttatcgatgcctagggttaatcattaactacaaggaacccctagtgatggagttggccactccctctctgcgcgctcgctcgctcactgaggccgggcgaccaaaggtcgcccgacgcccgggctttgcccgggcggcctcagtgagcgagcgagcgcgcag

SEQ ID NO: 5170 - DNA, 2198 bp, synthetic construct
  source 1..2198: mol_type = other DNA
ctgcgcgctcgctcgctcactgaggccgcccgggcaaagcccgggcgtcgggcgacctttggtcgcccggcctcagtgagcgagcgagcgcgcagagagggagtgtagccatgctctaggaagatcaattcaattcacgcgtcgacattgattattgactagttattaatagtaatcaattacggggtcattagttcatagcccatatatggagttccgcgttacataacttacggtaaatggcccgcctggctgaccgcccaacgacccccgcccattgacgtcaataatgacgtatgttcccatagtaacgccaatagggactttccattgacgtcaatgggtggagtatttacggtaaactgcccacttggcagtacatcaagtgtatcatatgccaagtacgccccctattgacgtcaatgacggtaaatggcccgcctggcattatgcccagtacatgaccttatgggactttcctacttggcagtacatctacgtattagtcatcgctattaccatgtcgaggccacgttctgcttcactctccccatctcccccccctccccacccccaattttgtatttatttattttttaattattttgtgcagcgatgggggcggggggggggggcgcgcgccaggcggggcggggcggggcgaggggcggggcggggcgaggcggagaggtgcggcggcagccaatcagagcggcgcgctccgaaagtttccttttatggcgaggcggcggcggcggcggccctataaaaagcgaagcgcgcggcgggcgggagcaagcttcgtttagtgaaccgtcagatcgcctggagacgccatccacgctgttttgacctccatagaagacaccgggaccgatccagcctccgcggattcgaatcccggccgggaacggtgcattggaacgcggattccccgtgccaagagtgacgtaagtaccgcctatagagtctataggcccacaaaaaatgctttcttcttttaatatacttttttgtttatcttatttctaatactttccctaatctctttctttcagggcaataatgatacaatgtatcatgcctctttgcaccattctaaagaataacagtgataatttctgggttaaggcaatagcaatatttctgcatataaatatttctgcatataaattgtaactgatgtaagaggtttcatattgctaatagcagctacaatccagctaccattctgcttttattttatggttgggataaggctggattattctgagtccaagctaggcccttttgctaatcatgttcatacctcttatcttcctcccacagctcctgggcaacgtgctggtctgtgtgctggcccatcactttggcaaagaattgggattcgaaccggtgtgctgggcggggggcggcgggccctcccgcagaacaccatgcgctcttcggaagctttggctcgggacttcccctgtgacctggtgaagtcccgagccaaagcttctgaggagcgccttgacagcagccatgggagggccgccccctacctcagtgactcgaggggtggcatccctgtgacccctccccagtgcctctcctggccctggaagttgccactccagtgcccaccagccttgtcctaataaaattaagttgcatcattttgtctgactaggtgtccttctataatattatggggtggaggggggtggtatggagcaaggggcaagttgggaagacaacctgtagggcctgcggggtctattgggaaccaagctggagtgcagtggcacaatcttggctcactgcaatctccgcctcctgggttcaagcgattctcctgcctcagcctcccgagttgttgggattccaggcatgcatgaccaggctcagctaatttttgtttttttggtagagacggggtttcaccatattggccaggctggtctccaactcctaatctcaggtgatctacccaccttggcctcccaaattgctgggattacaggcgtgaaccactgctcccttccctgtccttatcgatgcctagggttaatcattaactacaaggaacccctagtgatggagttggccactccctctctgcgcgctcgctcgctcactgaggccgggcgaccaaaggtcgcccgacgcccgggctttgcccgggcggcctcagtgagcgagcgagcgcgcag

SEQ ID NO: 5171 - DNA, 2198 bp, synthetic construct
  source 1..2198: mol_type = other DNA
ctgcgcgctcgctcgctcactgaggccgcccgggcaaagcccgggcgtcgggcgacctttggtcgcccggcctcagtgagcgagcgagcgcgcagagagggagtgtagccatgctctaggaagatcaattcaattcacgcgtcgacattgattattgactagttattaatagtaatcaattacggggtcattagttcatagcccatatatggagttccgcgttacataacttacggtaaatggcccgcctggctgaccgcccaacgacccccgcccattgacgtcaataatgacgtatgttcccatagtaacgccaatagggactttccattgacgtcaatgggtggagtatttacggtaaactgcccacttggcagtacatcaagtgtatcatatgccaagtacgccccctattgacgtcaatgacggtaaatggcccgcctggcattatgcccagtacatgaccttatgggactttcctacttggcagtacatctacgtattagtcatcgctattaccatgtcgaggccacgttctgcttcactctccccatctcccccccctccccacccccaattttgtatttatttattttttaattattttgtgcagcgatgggggcggggggggggggcgcgcgccaggcggggcggggcggggcgaggggcggggcggggcgaggcggagaggtgcggcggcagccaatcagagcggcgcgctccgaaagtttccttttatggcgaggcggcggcggcggcggccctataaaaagcgaagcgcgcggcgggcgggagcaagcttcgtttagtgaaccgtcagatcgcctggagacgccatccacgctgttttgacctccatagaagacaccgggaccgatccagcctccgcggattcgaatcccggccgggaacggtgcattggaacgcggattccccgtgccaagagtgacgtaagtaccgcctatagagtctataggcccacaaaaaatgctttcttcttttaatatacttttttgtttatcttatttctaatactttccctaatctctttctttcagggcaataatgatacaatgtatcatgcctctttgcaccattctaaagaataacagtgataatttctgggttaaggcaatagcaatatttctgcatataaatatttctgcatataaattgtaactgatgtaagaggtttcatattgctaatagcagctacaatccagctaccattctgcttttattttatggttgggataaggctggattattctgagtccaagctaggcccttttgctaatcatgttcatacctcttatcttcctcccacagctcctgggcaacgtgctggtctgtgtgctggcccatcactttggcaaagaattgggattcgaaccggtgtgctgggcggggggcggcgggccctcccgcagaacaccatgcgctcttcggaaagctgaccttccgcgagaccctgtgacctggttctcgcggaaggtcagctttctgaggagcgccttgacagcagccatgggagggccgccccctacctcagtgactcgaggggtggcatccctgtgacccctccccagtgcctctcctggccctggaagttgccactccagtgcccaccagccttgtcctaataaaattaagttgcatcattttgtctgactaggtgtccttctataatattatggggtggaggggggtggtatggagcaaggggcaagttgggaagacaacctgtagggcctgcggggtctattgggaaccaagctggagtgcagtggcacaatcttggctcactgcaatctccgcctcctgggttcaagcgattctcctgcctcagcctcccgagttgttgggattccaggcatgcatgaccaggctcagctaatttttgtttttttggtagagacggggtttcaccatattggccaggctggtctccaactcctaatctcaggtgatctacccaccttggcctcccaaattgctgggattacaggcgtgaaccactgctcccttccctgtccttatcgatgcctagggttaatcattaactacaaggaacccctagtgatggagttggccactccctctctgcgcgctcgctcgctcactgaggccgggcgaccaaaggtcgcccgacgcccgggctttgcccgggcggcctcagtgagcgagcgagcgcgcag

SEQ ID NO: 5172 - DNA, 2198 bp, synthetic construct
  source 1..2198: mol_type = other DNA
ctgcgcgctcgctcgctcactgaggccgcccgggcaaagcccgggcgtcgggcgacctttggtcgcccggcctcagtgagcgagcgagcgcgcagagagggagtgtagccatgctctaggaagatcaattcaattcacgcgtcgacattgattattgactagttattaatagtaatcaattacggggtcattagttcatagcccatatatggagttccgcgttacataacttacggtaaatggcccgcctggctgaccgcccaacgacccccgcccattgacgtcaataatgacgtatgttcccatagtaacgccaatagggactttccattgacgtcaatgggtggagtatttacggtaaactgcccacttggcagtacatcaagtgtatcatatgccaagtacgccccctattgacgtcaatgacggtaaatggcccgcctggcattatgcccagtacatgaccttatgggactttcctacttggcagtacatctacgtattagtcatcgctattaccatgtcgaggccacgttctgcttcactctccccatctcccccccctccccacccccaattttgtatttatttattttttaattattttgtgcagcgatgggggcggggggggggggcgcgcgccaggcggggcggggcggggcgaggggcggggcggggcgaggcggagaggtgcggcggcagccaatcagagcggcgcgctccgaaagtttccttttatggcgaggcggcggcggcggcggccctataaaaagcgaagcgcgcggcgggcgggagcaagcttcgtttagtgaaccgtcagatcgcctggagacgccatccacgctgttttgacctccatagaagacaccgggaccgatccagcctccgcggattcgaatcccggccgggaacggtgcattggaacgcggattccccgtgccaagagtgacgtaagtaccgcctatagagtctataggcccacaaaaaatgctttcttcttttaatatacttttttgtttatcttatttctaatactttccctaatctctttctttcagggcaataatgatacaatgtatcatgcctctttgcaccattctaaagaataacagtgataatttctgggttaaggcaatagcaatatttctgcatataaatatttctgcatataaattgtaactgatgtaagaggtttcatattgctaatagcagctacaatccagctaccattctgcttttattttatggttgggataaggctggattattctgagtccaagctaggcccttttgctaatcatgttcatacctcttatcttcctcccacagctcctgggcaacgtgctggtctgtgtgctggcccatcactttggcaaagaattgggattcgaaccggtgtgctgggcggggggcggcgggccctcccgcagaacaccatgcgctcttcggaagccgtcttccgccaagagccctgtgacctggtctcttggcggaagacggcttctgaggagcgccttgacagcagccatgggagggccgccccctacctcagtgactcgaggggtggcatccctgtgacccctccccagtgcctctcctggccctggaagttgccactccagtgcccaccagccttgtcctaataaaattaagttgcatcattttgtctgactaggtgtccttctataatattatggggtggaggggggtggtatggagcaaggggcaagttgggaagacaacctgtagggcctgcggggtctattgggaaccaagctggagtgcagtggcacaatcttggctcactgcaatctccgcctcctgggttcaagcgattctcctgcctcagcctcccgagttgttgggattccaggcatgcatgaccaggctcagctaatttttgtttttttggtagagacggggtttcaccatattggccaggctggtctccaactcctaatctcaggtgatctacccaccttggcctcccaaattgctgggattacaggcgtgaaccactgctcccttccctgtccttatcgatgcctagggttaatcattaactacaaggaacccctagtgatggagttggccactccctctctgcgcgctcgctcgctcactgaggccgggcgaccaaaggtcgcccgacgcccgggctttgcccgggcggcctcagtgagcgagcgagcgcgcag

SEQ ID NO: 5173 - DNA, 2300 bp, synthetic construct
  source 1..2300: mol_type = other DNA
ctgcgcgctcgctcgctcactgaggccgcccgggcaaagcccgggcgtcgggcgacctttggtcgcccggcctcagtgagcgagcgagcgcgcagagagggagtgtagccatgctctaggaagatcaattcaattcacgcgtcgacattgattattgactagttattaatagtaatcaattacggggtcattagttcatagcccatatatggagttccgcgttacataacttacggtaaatggcccgcctggctgaccgcccaacgacccccgcccattgacgtcaataatgacgtatgttcccatagtaacgccaatagggactttccattgacgtcaatgggtggagtatttacggtaaactgcccacttggcagtacatcaagtgtatcatatgccaagtacgccccctattgacgtcaatgacggtaaatggcccgcctggcattatgcccagtacatgaccttatgggactttcctacttggcagtacatctacgtattagtcatcgctattaccatgtcgaggccacgttctgcttcactctccccatctcccccccctccccacccccaattttgtatttatttattttttaattattttgtgcagcgatgggggcggggggggggggcgcgcgccaggcggggcggggcggggcgaggggcggggcggggcgaggcggagaggtgcggcggcagccaatcagagcggcgcgctccgaaagtttccttttatggcgaggcggcggcggcggcggccctataaaaagcgaagcgcgcggcgggcgggagcaagcttcgtttagtgaaccgtcagatcgcctggagacgccatccacgctgttttgacctccatagaagacaccgggaccgatccagcctccgcggattcgaatcccggccgggaacggtgcattggaacgcggattccccgtgccaagagtgacgtaagtaccgcctatagagtctataggcccacaaaaaatgctttcttcttttaatatacttttttgtttatcttatttctaatactttccctaatctctttctttcagggcaataatgatacaatgtatcatgcctctttgcaccattctaaagaataacagtgataatttctgggttaaggcaatagcaatatttctgcatataaatatttctgcatataaattgtaactgatgtaagaggtttcatattgctaatagcagctacaatccagctaccattctgcttttattttatggttgggataaggctggattattctgagtccaagctaggcccttttgctaatcatgttcatacctcttatcttcctcccacagctcctgggcaacgtgctggtctgtgtgctggcccatcactttggcaaagaattgggattcgaaccggtgaagcaaagaaggggcagagggagcccgtgagctgagtgggccagggactgggagaaggagtgaggaggcagggccggcatgcctctgctgctggccagagactggaagcgatgacaatctgtctgcacctgtcactagtttgtcatcgcttccagtctttggccgtgtagtgctacccagcgctggctgcctcctcagcattgcaattcctctcccatctgggcaccagtcagctaccctggtgggaatctgggtagccctcgaggggtggcatccctgtgacccctccccagtgcctctcctggccctggaagttgccactccagtgcccaccagccttgtcctaataaaattaagttgcatcattttgtctgactaggtgtccttctataatattatggggtggaggggggtggtatggagcaaggggcaagttgggaagacaacctgtagggcctgcggggtctattgggaaccaagctggagtgcagtggcacaatcttggctcactgcaatctccgcctcctgggttcaagcgattctcctgcctcagcctcccgagttgttgggattccaggcatgcatgaccaggctcagctaatttttgtttttttggtagagacggggtttcaccatattggccaggctggtctccaactcctaatctcaggtgatctacccaccttggcctcccaaattgctgggattacaggcgtgaaccactgctcccttccctgtccttatcgatgcctagggttaatcattaactacaaggaacccctagtgatggagttggccactccctctctgcgcgctcgctcgctcactgaggccgggcgaccaaaggtcgcccgacgcccgggctttgcccgggcggcctcagtgagcgagcgagcgcgcag

SEQ ID NO: 5174 - DNA, 2198 bp, synthetic construct
  source 1..2198: mol_type = other DNA
ctgcgcgctcgctcgctcactgaggccgcccgggcaaagcccgggcgtcgggcgacctttggtcgcccggcctcagtgagcgagcgagcgcgcagagagggagtgtagccatgctctaggaagatcaattcaattcacgcgtcgacattgattattgactagttattaatagtaatcaattacggggtcattagttcatagcccatatatggagttccgcgttacataacttacggtaaatggcccgcctggctgaccgcccaacgacccccgcccattgacgtcaataatgacgtatgttcccatagtaacgccaatagggactttccattgacgtcaatgggtggagtatttacggtaaactgcccacttggcagtacatcaagtgtatcatatgccaagtacgccccctattgacgtcaatgacggtaaatggcccgcctggcattatgcccagtacatgaccttatgggactttcctacttggcagtacatctacgtattagtcatcgctattaccatgtcgaggccacgttctgcttcactctccccatctcccccccctccccacccccaattttgtatttatttattttttaattattttgtgcagcgatgggggcggggggggggggcgcgcgccaggcggggcggggcggggcgaggggcggggcggggcgaggcggagaggtgcggcggcagccaatcagagcggcgcgctccgaaagtttccttttatggcgaggcggcggcggcggcggccctataaaaagcgaagcgcgcggcgggcgggagcaagcttcgtttagtgaaccgtcagatcgcctggagacgccatccacgctgttttgacctccatagaagacaccgggaccgatccagcctccgcggattcgaatcccggccgggaacggtgcattggaacgcggattccccgtgccaagagtgacgtaagtaccgcctatagagtctataggcccacaaaaaatgctttcttcttttaatatacttttttgtttatcttatttctaatactttccctaatctctttctttcagggcaataatgatacaatgtatcatgcctctttgcaccattctaaagaataacagtgataatttctgggttaaggcaatagcaatatttctgcatataaatatttctgcatataaattgtaactgatgtaagaggtttcatattgctaatagcagctacaatccagctaccattctgcttttattttatggttgggataaggctggattattctgagtccaagctaggcccttttgctaatcatgttcatacctcttatcttcctcccacagctcctgggcaacgtgctggtctgtgtgctggcccatcactttggcaaagaattgggattcgaaccggtgtgctgggcggggggcggcgggccctcccgcagaacaccatgcgctcttcggaagactggaagcgatgacaaccctgtgacctggtttgtcatcgcttccagtcttctgaggagcgccttgacagcagccatgggagggccgccccctacctcagtgactcgaggggtggcatccctgtgacccctccccagtgcctctcctggccctggaagttgccactccagtgcccaccagccttgtcctaataaaattaagttgcatcattttgtctgactaggtgtccttctataatattatggggtggaggggggtggtatggagcaaggggcaagttgggaagacaacctgtagggcctgcggggtctattgggaaccaagctggagtgcagtggcacaatcttggctcactgcaatctccgcctcctgggttcaagcgattctcctgcctcagcctcccgagttgttgggattccaggcatgcatgaccaggctcagctaatttttgtttttttggtagagacggggtttcaccatattggccaggctggtctccaactcctaatctcaggtgatctacccaccttggcctcccaaattgctgggattacaggcgtgaaccactgctcccttccctgtccttatcgatgcctagggttaatcattaactacaaggaacccctagtgatggagttggccactccctctctgcgcgctcgctcgctcactgaggccgggcgaccaaaggtcgcccgacgcccgggctttgcccgggcggcctcagtgagcgagcgagcgcgcag

SEQ ID NO: 5175 - DNA, 2198 bp, synthetic construct
  source 1..2198: mol_type = other DNA
ctgcgcgctcgctcgctcactgaggccgcccgggcaaagcccgggcgtcgggcgacctttggtcgcccggcctcagtgagcgagcgagcgcgcagagagggagtgtagccatgctctaggaagatcaattcaattcacgcgtcgacattgattattgactagttattaatagtaatcaattacggggtcattagttcatagcccatatatggagttccgcgttacataacttacggtaaatggcccgcctggctgaccgcccaacgacccccgcccattgacgtcaataatgacgtatgttcccatagtaacgccaatagggactttccattgacgtcaatgggtggagtatttacggtaaactgcccacttggcagtacatcaagtgtatcatatgccaagtacgccccctattgacgtcaatgacggtaaatggcccgcctggcattatgcccagtacatgaccttatgggactttcctacttggcagtacatctacgtattagtcatcgctattaccatgtcgaggccacgttctgcttcactctccccatctcccccccctccccacccccaattttgtatttatttattttttaattattttgtgcagcgatgggggcggggggggggggcgcgcgccaggcggggcggggcggggcgaggggcggggcggggcgaggcggagaggtgcggcggcagccaatcagagcggcgcgctccgaaagtttccttttatggcgaggcggcggcggcggcggccctataaaaagcgaagcgcgcggcgggcgggagcaagcttcgtttagtgaaccgtcagatcgcctggagacgccatccacgctgttttgacctccatagaagacaccgggaccgatccagcctccgcggattcgaatcccggccgggaacggtgcattggaacgcggattccccgtgccaagagtgacgtaagtaccgcctatagagtctataggcccacaaaaaatgctttcttcttttaatatacttttttgtttatcttatttctaatactttccctaatctctttctttcagggcaataatgatacaatgtatcatgcctctttgcaccattctaaagaataacagtgataatttctgggttaaggcaatagcaatatttctgcatataaatatttctgcatataaattgtaactgatgtaagaggtttcatattgctaatagcagctacaatccagctaccattctgcttttattttatggttgggataaggctggattattctgagtccaagctaggcccttttgctaatcatgttcatacctcttatcttcctcccacagctcctgggcaacgtgctggtctgtgtgctggcccatcactttggcaaagaattgggattcgaaccggtgtgctgggcggggggcggcgggccctcccgcagaacaccatgcgctcttcggaacttccgcgagaacgccaaccctgtgacctggtttggcgttctcgcggaagttctgaggagcgccttgacagcagccatgggagggccgccccctacctcagtgactcgaggggtggcatccctgtgacccctccccagtgcctctcctggccctggaagttgccactccagtgcccaccagccttgtcctaataaaattaagttgcatcattttgtctgactaggtgtccttctataatattatggggtggaggggggtggtatggagcaaggggcaagttgggaagacaacctgtagggcctgcggggtctattgggaaccaagctggagtgcagtggcacaatcttggctcactgcaatctccgcctcctgggttcaagcgattctcctgcctcagcctcccgagttgttgggattccaggcatgcatgaccaggctcagctaatttttgtttttttggtagagacggggtttcaccatattggccaggctggtctccaactcctaatctcaggtgatctacccaccttggcctcccaaattgctgggattacaggcgtgaaccactgctcccttccctgtccttatcgatgcctagggttaatcattaactacaaggaacccctagtgatggagttggccactccctctctgcgcgctcgctcgctcactgaggccgggcgaccaaaggtcgcccgacgcccgggctttgcccgggcggcctcagtgagcgagcgagcgcgcag

SEQ ID NO: 5176 - DNA, 2198 bp, synthetic construct
  source 1..2198: mol_type = other DNA
ctgcgcgctcgctcgctcactgaggccgcccgggcaaagcccgggcgtcgggcgacctttggtcgcccggcctcagtgagcgagcgagcgcgcagagagggagtgtagccatgctctaggaagatcaattcaattcacgcgtcgacattgattattgactagttattaatagtaatcaattacggggtcattagttcatagcccatatatggagttccgcgttacataacttacggtaaatggcccgcctggctgaccgcccaacgacccccgcccattgacgtcaataatgacgtatgttcccatagtaacgccaatagggactttccattgacgtcaatgggtggagtatttacggtaaactgcccacttggcagtacatcaagtgtatcatatgccaagtacgccccctattgacgtcaatgacggtaaatggcccgcctggcattatgcccagtacatgaccttatgggactttcctacttggcagtacatctacgtattagtcatcgctattaccatgtcgaggccacgttctgcttcactctccccatctcccccccctccccacccccaattttgtatttatttattttttaattattttgtgcagcgatgggggcggggggggggggcgcgcgccaggcggggcggggcggggcgaggggcggggcggggcgaggcggagaggtgcggcggcagccaatcagagcggcgcgctccgaaagtttccttttatggcgaggcggcggcggcggcggccctataaaaagcgaagcgcgcggcgggcgggagcaagcttcgtttagtgaaccgtcagatcgcctggagacgccatccacgctgttttgacctccatagaagacaccgggaccgatccagcctccgcggattcgaatcccggccgggaacggtgcattggaacgcggattccccgtgccaagagtgacgtaagtaccgcctatagagtctataggcccacaaaaaatgctttcttcttttaatatacttttttgtttatcttatttctaatactttccctaatctctttctttcagggcaataatgatacaatgtatcatgcctctttgcaccattctaaagaataacagtgataatttctgggttaaggcaatagcaatatttctgcatataaatatttctgcatataaattgtaactgatgtaagaggtttcatattgctaatagcagctacaatccagctaccattctgcttttattttatggttgggataaggctggattattctgagtccaagctaggcccttttgctaatcatgttcatacctcttatcttcctcccacagctcctgggcaacgtgctggtctgtgtgctggcccatcactttggcaaagaattgggattcgaaccggtgtgctgggcggggggcggcgggccctcccgcagaacaccatgcgctcttcggaagctcctcgcagttcggttccctgtgacctggtaaccgaactgcgaggagcttctgaggagcgccttgacagcagccatgggagggccgccccctacctcagtgactcgaggggtggcatccctgtgacccctccccagtgcctctcctggccctggaagttgccactccagtgcccaccagccttgtcctaataaaattaagttgcatcattttgtctgactaggtgtccttctataatattatggggtggaggggggtggtatggagcaaggggcaagttgggaagacaacctgtagggcctgcggggtctattgggaaccaagctggagtgcagtggcacaatcttggctcactgcaatctccgcctcctgggttcaagcgattctcctgcctcagcctcccgagttgttgggattccaggcatgcatgaccaggctcagctaatttttgtttttttggtagagacggggtttcaccatattggccaggctggtctccaactcctaatctcaggtgatctacccaccttggcctcccaaattgctgggattacaggcgtgaaccactgctcccttccctgtccttatcgatgcctagggttaatcattaactacaaggaacccctagtgatggagttggccactccctctctgcgcgctcgctcgctcactgaggccgggcgaccaaaggtcgcccgacgcccgggctttgcccgggcggcctcagtgagcgagcgagcgcgcag

SEQ ID NO: 5177 - DNA, 2198 bp, synthetic construct
  source 1..2198: mol_type = other DNA
ctgcgcgctcgctcgctcactgaggccgcccgggcaaagcccgggcgtcgggcgacctttggtcgcccggcctcagtgagcgagcgagcgcgcagagagggagtgtagccatgctctaggaagatcaattcaattcacgcgtcgacattgattattgactagttattaatagtaatcaattacggggtcattagttcatagcccatatatggagttccgcgttacataacttacggtaaatggcccgcctggctgaccgcccaacgacccccgcccattgacgtcaataatgacgtatgttcccatagtaacgccaatagggactttccattgacgtcaatgggtggagtatttacggtaaactgcccacttggcagtacatcaagtgtatcatatgccaagtacgccccctattgacgtcaatgacggtaaatggcccgcctggcattatgcccagtacatgaccttatgggactttcctacttggcagtacatctacgtattagtcatcgctattaccatgtcgaggccacgttctgcttcactctccccatctcccccccctccccacccccaattttgtatttatttattttttaattattttgtgcagcgatgggggcggggggggggggcgcgcgccaggcggggcggggcggggcgaggggcggggcggggcgaggcggagaggtgcggcggcagccaatcagagcggcgcgctccgaaagtttccttttatggcgaggcggcggcggcggcggccctataaaaagcgaagcgcgcggcgggcgggagcaagcttcgtttagtgaaccgtcagatcgcctggagacgccatccacgctgttttgacctccatagaagacaccgggaccgatccagcctccgcggattcgaatcccggccgggaacggtgcattggaacgcggattccccgtgccaagagtgacgtaagtaccgcctatagagtctataggcccacaaaaaatgctttcttcttttaatatacttttttgtttatcttatttctaatactttccctaatctctttctttcagggcaataatgatacaatgtatcatgcctctttgcaccattctaaagaataacagtgataatttctgggttaaggcaatagcaatatttctgcatataaatatttctgcatataaattgtaactgatgtaagaggtttcatattgctaatagcagctacaatccagctaccattctgcttttattttatggttgggataaggctggattattctgagtccaagctaggcccttttgctaatcatgttcatacctcttatcttcctcccacagctcctgggcaacgtgctggtctgtgtgctggcccatcactttggcaaagaattgggattcgaaccggtgtgctgggcggggggcggcgggccctcccgcagaacaccatgcgctcttcggaaggctttggctcgggacttccctgtgacctggtaagtcccgagccaaagccttctgaggagcgccttgacagcagccatgggagggccgccccctacctcagtgactcgaggggtggcatccctgtgacccctccccagtgcctctcctggccctggaagttgccactccagtgcccaccagccttgtcctaataaaattaagttgcatcattttgtctgactaggtgtccttctataatattatggggtggaggggggtggtatggagcaaggggcaagttgggaagacaacctgtagggcctgcggggtctattgggaaccaagctggagtgcagtggcacaatcttggctcactgcaatctccgcctcctgggttcaagcgattctcctgcctcagcctcccgagttgttgggattccaggcatgcatgaccaggctcagctaatttttgtttttttggtagagacggggtttcaccatattggccaggctggtctccaactcctaatctcaggtgatctacccaccttggcctcccaaattgctgggattacaggcgtgaaccactgctcccttccctgtccttatcgatgcctagggttaatcattaactacaaggaacccctagtgatggagttggccactccctctctgcgcgctcgctcgctcactgaggccgggcgaccaaaggtcgcccgacgcccgggctttgcccgggcggcctcagtgagcgagcgagcgcgcag

SEQ ID NO: 5178 - DNA, 2198 bp, synthetic construct
  source 1..2198: mol_type = other DNA
ctgcgcgctcgctcgctcactgaggccgcccgggcaaagcccgggcgtcgggcgacctttggtcgcccggcctcagtgagcgagcgagcgcgcagagagggagtgtagccatgctctaggaagatcaattcaattcacgcgtcgacattgattattgactagttattaatagtaatcaattacggggtcattagttcatagcccatatatggagttccgcgttacataacttacggtaaatggcccgcctggctgaccgcccaacgacccccgcccattgacgtcaataatgacgtatgttcccatagtaacgccaatagggactttccattgacgtcaatgggtggagtatttacggtaaactgcccacttggcagtacatcaagtgtatcatatgccaagtacgccccctattgacgtcaatgacggtaaatggcccgcctggcattatgcccagtacatgaccttatgggactttcctacttggcagtacatctacgtattagtcatcgctattaccatgtcgaggccacgttctgcttcactctccccatctcccccccctccccacccccaattttgtatttatttattttttaattattttgtgcagcgatgggggcggggggggggggcgcgcgccaggcggggcggggcggggcgaggggcggggcggggcgaggcggagaggtgcggcggcagccaatcagagcggcgcgctccgaaagtttccttttatggcgaggcggcggcggcggcggccctataaaaagcgaagcgcgcggcgggcgggagcaagcttcgtttagtgaaccgtcagatcgcctggagacgccatccacgctgttttgacctccatagaagacaccgggaccgatccagcctccgcggattcgaatcccggccgggaacggtgcattggaacgcggattccccgtgccaagagtgacgtaagtaccgcctatagagtctataggcccacaaaaaatgctttcttcttttaatatacttttttgtttatcttatttctaatactttccctaatctctttctttcagggcaataatgatacaatgtatcatgcctctttgcaccattctaaagaataacagtgataatttctgggttaaggcaatagcaatatttctgcatataaatatttctgcatataaattgtaactgatgtaagaggtttcatattgctaatagcagctacaatccagctaccattctgcttttattttatggttgggataaggctggattattctgagtccaagctaggcccttttgctaatcatgttcatacctcttatcttcctcccacagctcctgggcaacgtgctggtctgtgtgctggcccatcactttggcaaagaattgggattcgaaccggtgtgctgggcggggggcggcgggccctcccgcagaacaccatgcgctcttcggaagactggaagcgatgacaaacctgtgacctggtttgtcatcgcttccagtcttctgaggagcgccttgacagcagccatgggagggccgccccctacctcagtgactcgaggggtggcatccctgtgacccctccccagtgcctctcctggccctggaagttgccactccagtgcccaccagccttgtcctaataaaattaagttgcatcattttgtctgactaggtgtccttctataatattatggggtggaggggggtggtatggagcaaggggcaagttgggaagacaacctgtagggcctgcggggtctattgggaaccaagctggagtgcagtggcacaatcttggctcactgcaatctccgcctcctgggttcaagcgattctcctgcctcagcctcccgagttgttgggattccaggcatgcatgaccaggctcagctaatttttgtttttttggtagagacggggtttcaccatattggccaggctggtctccaactcctaatctcaggtgatctacccaccttggcctcccaaattgctgggattacaggcgtgaaccactgctcccttccctgtccttatcgatgcctagggttaatcattaactacaaggaacccctagtgatggagttggccactccctctctgcgcgctcgctcgctcactgaggccgggcgaccaaaggtcgcccgacgcccgggctttgcccgggcggcctcagtgagcgagcgagcgcgcag

SEQ ID NO: 5179 - DNA, 2198 bp, synthetic construct
  source 1..2198: mol_type = other DNA
ctgcgcgctcgctcgctcactgaggccgcccgggcaaagcccgggcgtcgggcgacctttggtcgcccggcctcagtgagcgagcgagcgcgcagagagggagtgtagccatgctctaggaagatcaattcaattcacgcgtcgacattgattattgactagttattaatagtaatcaattacggggtcattagttcatagcccatatatggagttccgcgttacataacttacggtaaatggcccgcctggctgaccgcccaacgacccccgcccattgacgtcaataatgacgtatgttcccatagtaacgccaatagggactttccattgacgtcaatgggtggagtatttacggtaaactgcccacttggcagtacatcaagtgtatcatatgccaagtacgccccctattgacgtcaatgacggtaaatggcccgcctggcattatgcccagtacatgaccttatgggactttcctacttggcagtacatctacgtattagtcatcgctattaccatgtcgaggccacgttctgcttcactctccccatctcccccccctccccacccccaattttgtatttatttattttttaattattttgtgcagcgatgggggcggggggggggggcgcgcgccaggcggggcggggcggggcgaggggcggggcggggcgaggcggagaggtgcggcggcagccaatcagagcggcgcgctccgaaagtttccttttatggcgaggcggcggcggcggcggccctataaaaagcgaagcgcgcggcgggcgggagcaagcttcgtttagtgaaccgtcagatcgcctggagacgccatccacgctgttttgacctccatagaagacaccgggaccgatccagcctccgcggattcgaatcccggccgggaacggtgcattggaacgcggattccccgtgccaagagtgacgtaagtaccgcctatagagtctataggcccacaaaaaatgctttcttcttttaatatacttttttgtttatcttatttctaatactttccctaatctctttctttcagggcaataatgatacaatgtatcatgcctctttgcaccattctaaagaataacagtgataatttctgggttaaggcaatagcaatatttctgcatataaatatttctgcatataaattgtaactgatgtaagaggtttcatattgctaatagcagctacaatccagctaccattctgcttttattttatggttgggataaggctggattattctgagtccaagctaggcccttttgctaatcatgttcatacctcttatcttcctcccacagctcctgggcaacgtgctggtctgtgtgctggcccatcactttggcaaagaattgggattcgaaccggtgtgctgggcggggggcggcgggccctcccgcagaacaccatgcgctcttcggaacttccgcgagaacgccaaacctgtgacctggtttggcgttctcgcggaagttctgaggagcgccttgacagcagccatgggagggccgccccctacctcagtgactcgaggggtggcatccctgtgacccctccccagtgcctctcctggccctggaagttgccactccagtgcccaccagccttgtcctaataaaattaagttgcatcattttgtctgactaggtgtccttctataatattatggggtggaggggggtggtatggagcaaggggcaagttgggaagacaacctgtagggcctgcggggtctattgggaaccaagctggagtgcagtggcacaatcttggctcactgcaatctccgcctcctgggttcaagcgattctcctgcctcagcctcccgagttgttgggattccaggcatgcatgaccaggctcagctaatttttgtttttttggtagagacggggtttcaccatattggccaggctggtctccaactcctaatctcaggtgatctacccaccttggcctcccaaattgctgggattacaggcgtgaaccactgctcccttccctgtccttatcgatgcctagggttaatcattaactacaaggaacccctagtgatggagttggccactccctctctgcgcgctcgctcgctcactgaggccgggcgaccaaaggtcgcccgacgcccgggctttgcccgggcggcctcagtgagcgagcgagcgcgcag

SEQ ID NO: 5180 - DNA, 2198 bp, synthetic construct
  source 1..2198: mol_type = other DNA
ctgcgcgctcgctcgctcactgaggccgcccgggcaaagcccgggcgtcgggcgacctttggtcgcccggcctcagtgagcgagcgagcgcgcagagagggagtgtagccatgctctaggaagatcaattcaattcacgcgtcgacattgattattgactagttattaatagtaatcaattacggggtcattagttcatagcccatatatggagttccgcgttacataacttacggtaaatggcccgcctggctgaccgcccaacgacccccgcccattgacgtcaataatgacgtatgttcccatagtaacgccaatagggactttccattgacgtcaatgggtggagtatttacggtaaactgcccacttggcagtacatcaagtgtatcatatgccaagtacgccccctattgacgtcaatgacggtaaatggcccgcctggcattatgcccagtacatgaccttatgggactttcctacttggcagtacatctacgtattagtcatcgctattaccatgtcgaggccacgttctgcttcactctccccatctcccccccctccccacccccaattttgtatttatttattttttaattattttgtgcagcgatgggggcggggggggggggcgcgcgccaggcggggcggggcggggcgaggggcggggcggggcgaggcggagaggtgcggcggcagccaatcagagcggcgcgctccgaaagtttccttttatggcgaggcggcggcggcggcggccctataaaaagcgaagcgcgcggcgggcgggagcaagcttcgtttagtgaaccgtcagatcgcctggagacgccatccacgctgttttgacctccatagaagacaccgggaccgatccagcctccgcggattcgaatcccggccgggaacggtgcattggaacgcggattccccgtgccaagagtgacgtaagtaccgcctatagagtctataggcccacaaaaaatgctttcttcttttaatatacttttttgtttatcttatttctaatactttccctaatctctttctttcagggcaataatgatacaatgtatcatgcctctttgcaccattctaaagaataacagtgataatttctgggttaaggcaatagcaatatttctgcatataaatatttctgcatataaattgtaactgatgtaagaggtttcatattgctaatagcagctacaatccagctaccattctgcttttattttatggttgggataaggctggattattctgagtccaagctaggcccttttgctaatcatgttcatacctcttatcttcctcccacagctcctgggcaacgtgctggtctgtgtgctggcccatcactttggcaaagaattgggattcgaaccggtgtgctgggcggggggcggcgggccctcccgcagaacaccatgcgctcttcggaagctcctcgcagttcggttgcctgtgacctggtaaccgaactgcgaggagcttctgaggagcgccttgacagcagccatgggagggccgccccctacctcagtgactcgaggggtggcatccctgtgacccctccccagtgcctctcctggccctggaagttgccactccagtgcccaccagccttgtcctaataaaattaagttgcatcattttgtctgactaggtgtccttctataatattatggggtggaggggggtggtatggagcaaggggcaagttgggaagacaacctgtagggcctgcggggtctattgggaaccaagctggagtgcagtggcacaatcttggctcactgcaatctccgcctcctgggttcaagcgattctcctgcctcagcctcccgagttgttgggattccaggcatgcatgaccaggctcagctaatttttgtttttttggtagagacggggtttcaccatattggccaggctggtctccaactcctaatctcaggtgatctacccaccttggcctcccaaattgctgggattacaggcgtgaaccactgctcccttccctgtccttatcgatgcctagggttaatcattaactacaaggaacccctagtgatggagttggccactccctctctgcgcgctcgctcgctcactgaggccgggcgaccaaaggtcgcccgacgcccgggctttgcccgggcggcctcagtgagcgagcgagcgcgcag

SEQ ID NO: 5181 - DNA, 2198 bp, synthetic construct
  source 1..2198: mol_type = other DNA
ctgcgcgctcgctcgctcactgaggccgcccgggcaaagcccgggcgtcgggcgacctttggtcgcccggcctcagtgagcgagcgagcgcgcagagagggagtgtagccatgctctaggaagatcaattcaattcacgcgtcgacattgattattgactagttattaatagtaatcaattacggggtcattagttcatagcccatatatggagttccgcgttacataacttacggtaaatggcccgcctggctgaccgcccaacgacccccgcccattgacgtcaataatgacgtatgttcccatagtaacgccaatagggactttccattgacgtcaatgggtggagtatttacggtaaactgcccacttggcagtacatcaagtgtatcatatgccaagtacgccccctattgacgtcaatgacggtaaatggcccgcctggcattatgcccagtacatgaccttatgggactttcctacttggcagtacatctacgtattagtcatcgctattaccatgtcgaggccacgttctgcttcactctccccatctcccccccctccccacccccaattttgtatttatttattttttaattattttgtgcagcgatgggggcggggggggggggcgcgcgccaggcggggcggggcggggcgaggggcggggcggggcgaggcggagaggtgcggcggcagccaatcagagcggcgcgctccgaaagtttccttttatggcgaggcggcggcggcggcggccctataaaaagcgaagcgcgcggcgggcgggagcaagcttcgtttagtgaaccgtcagatcgcctggagacgccatccacgctgttttgacctccatagaagacaccgggaccgatccagcctccgcggattcgaatcccggccgggaacggtgcattggaacgcggattccccgtgccaagagtgacgtaagtaccgcctatagagtctataggcccacaaaaaatgctttcttcttttaatatacttttttgtttatcttatttctaatactttccctaatctctttctttcagggcaataatgatacaatgtatcatgcctctttgcaccattctaaagaataacagtgataatttctgggttaaggcaatagcaatatttctgcatataaatatttctgcatataaattgtaactgatgtaagaggtttcatattgctaatagcagctacaatccagctaccattctgcttttattttatggttgggataaggctggattattctgagtccaagctaggcccttttgctaatcatgttcatacctcttatcttcctcccacagctcctgggcaacgtgctggtctgtgtgctggcccatcactttggcaaagaattgggattcgaaccggtgtgctgggcggggggcggcgggccctcccgcagaacaccatgcgctcttcggaaggctttggctcgggacttacctgtgacctggtaagtcccgagccaaagccttctgaggagcgccttgacagcagccatgggagggccgccccctacctcagtgactcgaggggtggcatccctgtgacccctccccagtgcctctcctggccctggaagttgccactccagtgcccaccagccttgtcctaataaaattaagttgcatcattttgtctgactaggtgtccttctataatattatggggtggaggggggtggtatggagcaaggggcaagttgggaagacaacctgtagggcctgcggggtctattgggaaccaagctggagtgcagtggcacaatcttggctcactgcaatctccgcctcctgggttcaagcgattctcctgcctcagcctcccgagttgttgggattccaggcatgcatgaccaggctcagctaatttttgtttttttggtagagacggggtttcaccatattggccaggctggtctccaactcctaatctcaggtgatctacccaccttggcctcccaaattgctgggattacaggcgtgaaccactgctcccttccctgtccttatcgatgcctagggttaatcattaactacaaggaacccctagtgatggagttggccactccctctctgcgcgctcgctcgctcactgaggccgggcgaccaaaggtcgcccgacgcccgggctttgcccgggcggcctcagtgagcgagcgagcgcgcag

SEQ ID NO: 5182 - DNA, 2198 bp, synthetic construct
  source 1..2198: mol_type = other DNA
ctgcgcgctcgctcgctcactgaggccgcccgggcaaagcccgggcgtcgggcgacctttggtcgcccggcctcagtgagcgagcgagcgcgcagagagggagtgtagccatgctctaggaagatcaattcaattcacgcgtcgacattgattattgactagttattaatagtaatcaattacggggtcattagttcatagcccatatatggagttccgcgttacataacttacggtaaatggcccgcctggctgaccgcccaacgacccccgcccattgacgtcaataatgacgtatgttcccatagtaacgccaatagggactttccattgacgtcaatgggtggagtatttacggtaaactgcccacttggcagtacatcaagtgtatcatatgccaagtacgccccctattgacgtcaatgacggtaaatggcccgcctggcattatgcccagtacatgaccttatgggactttcctacttggcagtacatctacgtattagtcatcgctattaccatgtcgaggccacgttctgcttcactctccccatctcccccccctccccacccccaattttgtatttatttattttttaattattttgtgcagcgatgggggcggggggggggggcgcgcgccaggcggggcggggcggggcgaggggcggggcggggcgaggcggagaggtgcggcggcagccaatcagagcggcgcgctccgaaagtttccttttatggcgaggcggcggcggcggcggccctataaaaagcgaagcgcgcggcgggcgggagcaagcttcgtttagtgaaccgtcagatcgcctggagacgccatccacgctgttttgacctccatagaagacaccgggaccgatccagcctccgcggattcgaatcccggccgggaacggtgcattggaacgcggattccccgtgccaagagtgacgtaagtaccgcctatagagtctataggcccacaaaaaatgctttcttcttttaatatacttttttgtttatcttatttctaatactttccctaatctctttctttcagggcaataatgatacaatgtatcatgcctctttgcaccattctaaagaataacagtgataatttctgggttaaggcaatagcaatatttctgcatataaatatttctgcatataaattgtaactgatgtaagaggtttcatattgctaatagcagctacaatccagctaccattctgcttttattttatggttgggataaggctggattattctgagtccaagctaggcccttttgctaatcatgttcatacctcttatcttcctcccacagctcctgggcaacgtgctggtctgtgtgctggcccatcactttggcaaagaattgggattcgaaccggtgtgctgggcggggggcggcgggccctcccgcagaacaccatgcgctcttcggaagactggaagcgatgacaatcctgtgatttggtttgtcatcgcttccagtcttctgaggagcgccttgacagcagccatgggagggccgccccctacctcagtgactcgaggggtggcatccctgtgacccctccccagtgcctctcctggccctggaagttgccactccagtgcccaccagccttgtcctaataaaattaagttgcatcattttgtctgactaggtgtccttctataatattatggggtggaggggggtggtatggagcaaggggcaagttgggaagacaacctgtagggcctgcggggtctattgggaaccaagctggagtgcagtggcacaatcttggctcactgcaatctccgcctcctgggttcaagcgattctcctgcctcagcctcccgagttgttgggattccaggcatgcatgaccaggctcagctaatttttgtttttttggtagagacggggtttcaccatattggccaggctggtctccaactcctaatctcaggtgatctacccaccttggcctcccaaattgctgggattacaggcgtgaaccactgctcccttccctgtccttatcgatgcctagggttaatcattaactacaaggaacccctagtgatggagttggccactccctctctgcgcgctcgctcgctcactgaggccgggcgaccaaaggtcgcccgacgcccgggctttgcccgggcggcctcagtgagcgagcgagcgcgcag

SEQ ID NO: 5183 - DNA, 2198 bp, synthetic construct
  source 1..2198: mol_type = other DNA
ctgcgcgctcgctcgctcactgaggccgcccgggcaaagcccgggcgtcgggcgacctttggtcgcccggcctcagtgagcgagcgagcgcgcagagagggagtgtagccatgctctaggaagatcaattcaattcacgcgtcgacattgattattgactagttattaatagtaatcaattacggggtcattagttcatagcccatatatggagttccgcgttacataacttacggtaaatggcccgcctggctgaccgcccaacgacccccgcccattgacgtcaataatgacgtatgttcccatagtaacgccaatagggactttccattgacgtcaatgggtggagtatttacggtaaactgcccacttggcagtacatcaagtgtatcatatgccaagtacgccccctattgacgtcaatgacggtaaatggcccgcctggcattatgcccagtacatgaccttatgggactttcctacttggcagtacatctacgtattagtcatcgctattaccatgtcgaggccacgttctgcttcactctccccatctcccccccctccccacccccaattttgtatttatttattttttaattattttgtgcagcgatgggggcggggggggggggcgcgcgccaggcggggcggggcggggcgaggggcggggcggggcgaggcggagaggtgcggcggcagccaatcagagcggcgcgctccgaaagtttccttttatggcgaggcggcggcggcggcggccctataaaaagcgaagcgcgcggcgggcgggagcaagcttcgtttagtgaaccgtcagatcgcctggagacgccatccacgctgttttgacctccatagaagacaccgggaccgatccagcctccgcggattcgaatcccggccgggaacggtgcattggaacgcggattccccgtgccaagagtgacgtaagtaccgcctatagagtctataggcccacaaaaaatgctttcttcttttaatatacttttttgtttatcttatttctaatactttccctaatctctttctttcagggcaataatgatacaatgtatcatgcctctttgcaccattctaaagaataacagtgataatttctgggttaaggcaatagcaatatttctgcatataaatatttctgcatataaattgtaactgatgtaagaggtttcatattgctaatagcagctacaatccagctaccattctgcttttattttatggttgggataaggctggattattctgagtccaagctaggcccttttgctaatcatgttcatacctcttatcttcctcccacagctcctgggcaacgtgctggtctgtgtgctggcccatcactttggcaaagaattgggattcgaaccggtgtgctgggcggggggcggcgggccctcccgcagaacaccatgcgctcttcggaacttccgcgagaacgccaatcctgtgatttggtttggcgttctcgcggaagttctgaggagcgccttgacagcagccatgggagggccgccccctacctcagtgactcgaggggtggcatccctgtgacccctccccagtgcctctcctggccctggaagttgccactccagtgcccaccagccttgtcctaataaaattaagttgcatcattttgtctgactaggtgtccttctataatattatggggtggaggggggtggtatggagcaaggggcaagttgggaagacaacctgtagggcctgcggggtctattgggaaccaagctggagtgcagtggcacaatcttggctcactgcaatctccgcctcctgggttcaagcgattctcctgcctcagcctcccgagttgttgggattccaggcatgcatgaccaggctcagctaatttttgtttttttggtagagacggggtttcaccatattggccaggctggtctccaactcctaatctcaggtgatctacccaccttggcctcccaaattgctgggattacaggcgtgaaccactgctcccttccctgtccttatcgatgcctagggttaatcattaactacaaggaacccctagtgatggagttggccactccctctctgcgcgctcgctcgctcactgaggccgggcgaccaaaggtcgcccgacgcccgggctttgcccgggcggcctcagtgagcgagcgagcgcgcag

SEQ ID NO: 5184 - DNA, 2198 bp, synthetic construct
  source 1..2198: mol_type = other DNA
ctgcgcgctcgctcgctcactgaggccgcccgggcaaagcccgggcgtcgggcgacctttggtcgcccggcctcagtgagcgagcgagcgcgcagagagggagtgtagccatgctctaggaagatcaattcaattcacgcgtcgacattgattattgactagttattaatagtaatcaattacggggtcattagttcatagcccatatatggagttccgcgttacataacttacggtaaatggcccgcctggctgaccgcccaacgacccccgcccattgacgtcaataatgacgtatgttcccatagtaacgccaatagggactttccattgacgtcaatgggtggagtatttacggtaaactgcccacttggcagtacatcaagtgtatcatatgccaagtacgccccctattgacgtcaatgacggtaaatggcccgcctggcattatgcccagtacatgaccttatgggactttcctacttggcagtacatctacgtattagtcatcgctattaccatgtcgaggccacgttctgcttcactctccccatctcccccccctccccacccccaattttgtatttatttattttttaattattttgtgcagcgatgggggcggggggggggggcgcgcgccaggcggggcggggcggggcgaggggcggggcggggcgaggcggagaggtgcggcggcagccaatcagagcggcgcgctccgaaagtttccttttatggcgaggcggcggcggcggcggccctataaaaagcgaagcgcgcggcgggcgggagcaagcttcgtttagtgaaccgtcagatcgcctggagacgccatccacgctgttttgacctccatagaagacaccgggaccgatccagcctccgcggattcgaatcccggccgggaacggtgcattggaacgcggattccccgtgccaagagtgacgtaagtaccgcctatagagtctataggcccacaaaaaatgctttcttcttttaatatacttttttgtttatcttatttctaatactttccctaatctctttctttcagggcaataatgatacaatgtatcatgcctctttgcaccattctaaagaataacagtgataatttctgggttaaggcaatagcaatatttctgcatataaatatttctgcatataaattgtaactgatgtaagaggtttcatattgctaatagcagctacaatccagctaccattctgcttttattttatggttgggataaggctggattattctgagtccaagctaggcccttttgctaatcatgttcatacctcttatcttcctcccacagctcctgggcaacgtgctggtctgtgtgctggcccatcactttggcaaagaattgggattcgaaccggtgtgctgggcggggggcggcgggccctcccgcagaacaccatgcgctcttcggaagctcctcgcagttcggtttcctgtgatttggtaaccgaactgcgaggagcttctgaggagcgccttgacagcagccatgggagggccgccccctacctcagtgactcgaggggtggcatccctgtgacccctccccagtgcctctcctggccctggaagttgccactccagtgcccaccagccttgtcctaataaaattaagttgcatcattttgtctgactaggtgtccttctataatattatggggtggaggggggtggtatggagcaaggggcaagttgggaagacaacctgtagggcctgcggggtctattgggaaccaagctggagtgcagtggcacaatcttggctcactgcaatctccgcctcctgggttcaagcgattctcctgcctcagcctcccgagttgttgggattccaggcatgcatgaccaggctcagctaatttttgtttttttggtagagacggggtttcaccatattggccaggctggtctccaactcctaatctcaggtgatctacccaccttggcctcccaaattgctgggattacaggcgtgaaccactgctcccttccctgtccttatcgatgcctagggttaatcattaactacaaggaacccctagtgatggagttggccactccctctctgcgcgctcgctcgctcactgaggccgggcgaccaaaggtcgcccgacgcccgggctttgcccgggcggcctcagtgagcgagcgagcgcgcag

SEQ ID NO: 5185 - DNA, 2198 bp, synthetic construct
  source 1..2198: mol_type = other DNA
ctgcgcgctcgctcgctcactgaggccgcccgggcaaagcccgggcgtcgggcgacctttggtcgcccggcctcagtgagcgagcgagcgcgcagagagggagtgtagccatgctctaggaagatcaattcaattcacgcgtcgacattgattattgactagttattaatagtaatcaattacggggtcattagttcatagcccatatatggagttccgcgttacataacttacggtaaatggcccgcctggctgaccgcccaacgacccccgcccattgacgtcaataatgacgtatgttcccatagtaacgccaatagggactttccattgacgtcaatgggtggagtatttacggtaaactgcccacttggcagtacatcaagtgtatcatatgccaagtacgccccctattgacgtcaatgacggtaaatggcccgcctggcattatgcccagtacatgaccttatgggactttcctacttggcagtacatctacgtattagtcatcgctattaccatgtcgaggccacgttctgcttcactctccccatctcccccccctccccacccccaattttgtatttatttattttttaattattttgtgcagcgatgggggcggggggggggggcgcgcgccaggcggggcggggcggggcgaggggcggggcggggcgaggcggagaggtgcggcggcagccaatcagagcggcgcgctccgaaagtttccttttatggcgaggcggcggcggcggcggccctataaaaagcgaagcgcgcggcgggcgggagcaagcttcgtttagtgaaccgtcagatcgcctggagacgccatccacgctgttttgacctccatagaagacaccgggaccgatccagcctccgcggattcgaatcccggccgggaacggtgcattggaacgcggattccccgtgccaagagtgacgtaagtaccgcctatagagtctataggcccacaaaaaatgctttcttcttttaatatacttttttgtttatcttatttctaatactttccctaatctctttctttcagggcaataatgatacaatgtatcatgcctctttgcaccattctaaagaataacagtgataatttctgggttaaggcaatagcaatatttctgcatataaatatttctgcatataaattgtaactgatgtaagaggtttcatattgctaatagcagctacaatccagctaccattctgcttttattttatggttgggataaggctggattattctgagtccaagctaggcccttttgctaatcatgttcatacctcttatcttcctcccacagctcctgggcaacgtgctggtctgtgtgctggcccatcactttggcaaagaattgggattcgaaccggtgtgctgggcggggggcggcgggccctcccgcagaacaccatgcgctcttcggaaggctttggctcgggactttcctgtgatttggtaagtcccgagccaaagccttctgaggagcgccttgacagcagccatgggagggccgccccctacctcagtgactcgaggggtggcatccctgtgacccctccccagtgcctctcctggccctggaagttgccactccagtgcccaccagccttgtcctaataaaattaagttgcatcattttgtctgactaggtgtccttctataatattatggggtggaggggggtggtatggagcaaggggcaagttgggaagacaacctgtagggcctgcggggtctattgggaaccaagctggagtgcagtggcacaatcttggctcactgcaatctccgcctcctgggttcaagcgattctcctgcctcagcctcccgagttgttgggattccaggcatgcatgaccaggctcagctaatttttgtttttttggtagagacggggtttcaccatattggccaggctggtctccaactcctaatctcaggtgatctacccaccttggcctcccaaattgctgggattacaggcgtgaaccactgctcccttccctgtccttatcgatgcctagggttaatcattaactacaaggaacccctagtgatggagttggccactccctctctgcgcgctcgctcgctcactgaggccgggcgaccaaaggtcgcccgacgcccgggctttgcccgggcggcctcagtgagcgagcgagcgcgcag

SEQ ID NO: 5186 - DNA, 2198 bp, synthetic construct
  source 1..2198: mol_type = other DNA
ctgcgcgctcgctcgctcactgaggccgcccgggcaaagcccgggcgtcgggcgacctttggtcgcccggcctcagtgagcgagcgagcgcgcagagagggagtgtagccatgctctaggaagatcaattcaattcacgcgtcgacattgattattgactagttattaatagtaatcaattacggggtcattagttcatagcccatatatggagttccgcgttacataacttacggtaaatggcccgcctggctgaccgcccaacgacccccgcccattgacgtcaataatgacgtatgttcccatagtaacgccaatagggactttccattgacgtcaatgggtggagtatttacggtaaactgcccacttggcagtacatcaagtgtatcatatgccaagtacgccccctattgacgtcaatgacggtaaatggcccgcctggcattatgcccagtacatgaccttatgggactttcctacttggcagtacatctacgtattagtcatcgctattaccatgtcgaggccacgttctgcttcactctccccatctcccccccctccccacccccaattttgtatttatttattttttaattattttgtgcagcgatgggggcggggggggggggcgcgcgccaggcggggcggggcggggcgaggggcggggcggggcgaggcggagaggtgcggcggcagccaatcagagcggcgcgctccgaaagtttccttttatggcgaggcggcggcggcggcggccctataaaaagcgaagcgcgcggcgggcgggagcaagcttcgtttagtgaaccgtcagatcgcctggagacgccatccacgctgttttgacctccatagaagacaccgggaccgatccagcctccgcggattcgaatcccggccgggaacggtgcattggaacgcggattccccgtgccaagagtgacgtaagtaccgcctatagagtctataggcccacaaaaaatgctttcttcttttaatatacttttttgtttatcttatttctaatactttccctaatctctttctttcagggcaataatgatacaatgtatcatgcctctttgcaccattctaaagaataacagtgataatttctgggttaaggcaatagcaatatttctgcatataaatatttctgcatataaattgtaactgatgtaagaggtttcatattgctaatagcagctacaatccagctaccattctgcttttattttatggttgggataaggctggattattctgagtccaagctaggcccttttgctaatcatgttcatacctcttatcttcctcccacagctcctgggcaacgtgctggtctgtgtgctggcccatcactttggcaaagaattgggattcgaaccggtgtgctgggcggggggcggcgggccctcccgcagaacaccatgcgctcttcggaagactggaagggatgacaaccctgtgacctggtttgtcatcgcttccagtcttctgtggagcgccttgacagcagccatgggagggccgccccctacctcagtgactcgaggggtggcatccctgtgacccctccccagtgcctctcctggccctggaagttgccactccagtgcccaccagccttgtcctaataaaattaagttgcatcattttgtctgactaggtgtccttctataatattatggggtggaggggggtggtatggagcaaggggcaagttgggaagacaacctgtagggcctgcggggtctattgggaaccaagctggagtgcagtggcacaatcttggctcactgcaatctccgcctcctgggttcaagcgattctcctgcctcagcctcccgagttgttgggattccaggcatgcatgaccaggctcagctaatttttgtttttttggtagagacggggtttcaccatattggccaggctggtctccaactcctaatctcaggtgatctacccaccttggcctcccaaattgctgggattacaggcgtgaaccactgctcccttccctgtccttatcgatgcctagggttaatcattaactacaaggaacccctagtgatggagttggccactccctctctgcgcgctcgctcgctcactgaggccgggcgaccaaaggtcgcccgacgcccgggctttgcccgggcggcctcagtgagcgagcgagcgcgcag

SEQ ID NO: 5187 - DNA, 2198 bp, synthetic construct
  source 1..2198: mol_type = other DNA
ctgcgcgctcgctcgctcactgaggccgcccgggcaaagcccgggcgtcgggcgacctttggtcgcccggcctcagtgagcgagcgagcgcgcagagagggagtgtagccatgctctaggaagatcaattcaattcacgcgtcgacattgattattgactagttattaatagtaatcaattacggggtcattagttcatagcccatatatggagttccgcgttacataacttacggtaaatggcccgcctggctgaccgcccaacgacccccgcccattgacgtcaataatgacgtatgttcccatagtaacgccaatagggactttccattgacgtcaatgggtggagtatttacggtaaactgcccacttggcagtacatcaagtgtatcatatgccaagtacgccccctattgacgtcaatgacggtaaatggcccgcctggcattatgcccagtacatgaccttatgggactttcctacttggcagtacatctacgtattagtcatcgctattaccatgtcgaggccacgttctgcttcactctccccatctcccccccctccccacccccaattttgtatttatttattttttaattattttgtgcagcgatgggggcggggggggggggcgcgcgccaggcggggcggggcggggcgaggggcggggcggggcgaggcggagaggtgcggcggcagccaatcagagcggcgcgctccgaaagtttccttttatggcgaggcggcggcggcggcggccctataaaaagcgaagcgcgcggcgggcgggagcaagcttcgtttagtgaaccgtcagatcgcctggagacgccatccacgctgttttgacctccatagaagacaccgggaccgatccagcctccgcggattcgaatcccggccgggaacggtgcattggaacgcggattccccgtgccaagagtgacgtaagtaccgcctatagagtctataggcccacaaaaaatgctttcttcttttaatatacttttttgtttatcttatttctaatactttccctaatctctttctttcagggcaataatgatacaatgtatcatgcctctttgcaccattctaaagaataacagtgataatttctgggttaaggcaatagcaatatttctgcatataaatatttctgcatataaattgtaactgatgtaagaggtttcatattgctaatagcagctacaatccagctaccattctgcttttattttatggttgggataaggctggattattctgagtccaagctaggcccttttgctaatcatgttcatacctcttatcttcctcccacagctcctgggcaacgtgctggtctgtgtgctggcccatcactttggcaaagaattgggattcgaaccggtgtgctgggcggggggcggcgggccctcccgcagaacaccatgcgctcttcggaacttccgcgacaacgccaaccctgtgacctggtttggcgttctcgcggaagttctgtggagcgccttgacagcagccatgggagggccgccccctacctcagtgactcgaggggtggcatccctgtgacccctccccagtgcctctcctggccctggaagttgccactccagtgcccaccagccttgtcctaataaaattaagttgcatcattttgtctgactaggtgtccttctataatattatggggtggaggggggtggtatggagcaaggggcaagttgggaagacaacctgtagggcctgcggggtctattgggaaccaagctggagtgcagtggcacaatcttggctcactgcaatctccgcctcctgggttcaagcgattctcctgcctcagcctcccgagttgttgggattccaggcatgcatgaccaggctcagctaatttttgtttttttggtagagacggggtttcaccatattggccaggctggtctccaactcctaatctcaggtgatctacccaccttggcctcccaaattgctgggattacaggcgtgaaccactgctcccttccctgtccttatcgatgcctagggttaatcattaactacaaggaacccctagtgatggagttggccactccctctctgcgcgctcgctcgctcactgaggccgggcgaccaaaggtcgcccgacgcccgggctttgcccgggcggcctcagtgagcgagcgagcgcgcag

SEQ ID NO: 5188 - DNA, 2198 bp, synthetic construct
  source 1..2198: mol_type = other DNA
ctgcgcgctcgctcgctcactgaggccgcccgggcaaagcccgggcgtcgggcgacctttggtcgcccggcctcagtgagcgagcgagcgcgcagagagggagtgtagccatgctctaggaagatcaattcaattcacgcgtcgacattgattattgactagttattaatagtaatcaattacggggtcattagttcatagcccatatatggagttccgcgttacataacttacggtaaatggcccgcctggctgaccgcccaacgacccccgcccattgacgtcaataatgacgtatgttcccatagtaacgccaatagggactttccattgacgtcaatgggtggagtatttacggtaaactgcccacttggcagtacatcaagtgtatcatatgccaagtacgccccctattgacgtcaatgacggtaaatggcccgcctggcattatgcccagtacatgaccttatgggactttcctacttggcagtacatctacgtattagtcatcgctattaccatgtcgaggccacgttctgcttcactctccccatctcccccccctccccacccccaattttgtatttatttattttttaattattttgtgcagcgatgggggcggggggggggggcgcgcgccaggcggggcggggcggggcgaggggcggggcggggcgaggcggagaggtgcggcggcagccaatcagagcggcgcgctccgaaagtttccttttatggcgaggcggcggcggcggcggccctataaaaagcgaagcgcgcggcgggcgggagcaagcttcgtttagtgaaccgtcagatcgcctggagacgccatccacgctgttttgacctccatagaagacaccgggaccgatccagcctccgcggattcgaatcccggccgggaacggtgcattggaacgcggattccccgtgccaagagtgacgtaagtaccgcctatagagtctataggcccacaaaaaatgctttcttcttttaatatacttttttgtttatcttatttctaatactttccctaatctctttctttcagggcaataatgatacaatgtatcatgcctctttgcaccattctaaagaataacagtgataatttctgggttaaggcaatagcaatatttctgcatataaatatttctgcatataaattgtaactgatgtaagaggtttcatattgctaatagcagctacaatccagctaccattctgcttttattttatggttgggataaggctggattattctgagtccaagctaggcccttttgctaatcatgttcatacctcttatcttcctcccacagctcctgggcaacgtgctggtctgtgtgctggcccatcactttggcaaagaattgggattcgaaccggtgtgctgggcggggggcggcgggccctcccgcagaacaccatgcgctcttcggaagctcctcgctgttcggttccctgtgacctggtaaccgaactgcgaggagcttctgtggagcgccttgacagcagccatgggagggccgccccctacctcagtgactcgaggggtggcatccctgtgacccctccccagtgcctctcctggccctggaagttgccactccagtgcccaccagccttgtcctaataaaattaagttgcatcattttgtctgactaggtgtccttctataatattatggggtggaggggggtggtatggagcaaggggcaagttgggaagacaacctgtagggcctgcggggtctattgggaaccaagctggagtgcagtggcacaatcttggctcactgcaatctccgcctcctgggttcaagcgattctcctgcctcagcctcccgagttgttgggattccaggcatgcatgaccaggctcagctaatttttgtttttttggtagagacggggtttcaccatattggccaggctggtctccaactcctaatctcaggtgatctacccaccttggcctcccaaattgctgggattacaggcgtgaaccactgctcccttccctgtccttatcgatgcctagggttaatcattaactacaaggaacccctagtgatggagttggccactccctctctgcgcgctcgctcgctcactgaggccgggcgaccaaaggtcgcccgacgcccgggctttgcccgggcggcctcagtgagcgagcgagcgcgcag

SEQ ID NO: 5189 - DNA, 2198 bp, synthetic construct
  source 1..2198: mol_type = other DNA
ctgcgcgctcgctcgctcactgaggccgcccgggcaaagcccgggcgtcgggcgacctttggtcgcccggcctcagtgagcgagcgagcgcgcagagagggagtgtagccatgctctaggaagatcaattcaattcacgcgtcgacattgattattgactagttattaatagtaatcaattacggggtcattagttcatagcccatatatggagttccgcgttacataacttacggtaaatggcccgcctggctgaccgcccaacgacccccgcccattgacgtcaataatgacgtatgttcccatagtaacgccaatagggactttccattgacgtcaatgggtggagtatttacggtaaactgcccacttggcagtacatcaagtgtatcatatgccaagtacgccccctattgacgtcaatgacggtaaatggcccgcctggcattatgcccagtacatgaccttatgggactttcctacttggcagtacatctacgtattagtcatcgctattaccatgtcgaggccacgttctgcttcactctccccatctcccccccctccccacccccaattttgtatttatttattttttaattattttgtgcagcgatgggggcggggggggggggcgcgcgccaggcggggcggggcggggcgaggggcggggcggggcgaggcggagaggtgcggcggcagccaatcagagcggcgcgctccgaaagtttccttttatggcgaggcggcggcggcggcggccctataaaaagcgaagcgcgcggcgggcgggagcaagcttcgtttagtgaaccgtcagatcgcctggagacgccatccacgctgttttgacctccatagaagacaccgggaccgatccagcctccgcggattcgaatcccggccgggaacggtgcattggaacgcggattccccgtgccaagagtgacgtaagtaccgcctatagagtctataggcccacaaaaaatgctttcttcttttaatatacttttttgtttatcttatttctaatactttccctaatctctttctttcagggcaataatgatacaatgtatcatgcctctttgcaccattctaaagaataacagtgataatttctgggttaaggcaatagcaatatttctgcatataaatatttctgcatataaattgtaactgatgtaagaggtttcatattgctaatagcagctacaatccagctaccattctgcttttattttatggttgggataaggctggattattctgagtccaagctaggcccttttgctaatcatgttcatacctcttatcttcctcccacagctcctgggcaacgtgctggtctgtgtgctggcccatcactttggcaaagaattgggattcgaaccggtgtgctgggcggggggcggcgggccctcccgcagaacaccatgcgctcttcggaaggctttggcacgggacttccctgtgacctggtaagtcccgagccaaagccttctgtggagcgccttgacagcagccatgggagggccgccccctacctcagtgactcgaggggtggcatccctgtgacccctccccagtgcctctcctggccctggaagttgccactccagtgcccaccagccttgtcctaataaaattaagttgcatcattttgtctgactaggtgtccttctataatattatggggtggaggggggtggtatggagcaaggggcaagttgggaagacaacctgtagggcctgcggggtctattgggaaccaagctggagtgcagtggcacaatcttggctcactgcaatctccgcctcctgggttcaagcgattctcctgcctcagcctcccgagttgttgggattccaggcatgcatgaccaggctcagctaatttttgtttttttggtagagacggggtttcaccatattggccaggctggtctccaactcctaatctcaggtgatctacccaccttggcctcccaaattgctgggattacaggcgtgaaccactgctcccttccctgtccttatcgatgcctagggttaatcattaactacaaggaacccctagtgatggagttggccactccctctctgcgcgctcgctcgctcactgaggccgggcgaccaaaggtcgcccgacgcccgggctttgcccgggcggcctcagtgagcgagcgagcgcgcag

SEQ ID NO: 5190 - DNA, 2198 bp, synthetic construct
  source 1..2198: mol_type = other DNA
ctgcgcgctcgctcgctcactgaggccgcccgggcaaagcccgggcgtcgggcgacctttggtcgcccggcctcagtgagcgagcgagcgcgcagagagggagtgtagccatgctctaggaagatcaattcaattcacgcgtcgacattgattattgactagttattaatagtaatcaattacggggtcattagttcatagcccatatatggagttccgcgttacataacttacggtaaatggcccgcctggctgaccgcccaacgacccccgcccattgacgtcaataatgacgtatgttcccatagtaacgccaatagggactttccattgacgtcaatgggtggagtatttacggtaaactgcccacttggcagtacatcaagtgtatcatatgccaagtacgccccctattgacgtcaatgacggtaaatggcccgcctggcattatgcccagtacatgaccttatgggactttcctacttggcagtacatctacgtattagtcatcgctattaccatgtcgaggccacgttctgcttcactctccccatctcccccccctccccacccccaattttgtatttatttattttttaattattttgtgcagcgatgggggcggggggggggggcgcgcgccaggcggggcggggcggggcgaggggcggggcggggcgaggcggagaggtgcggcggcagccaatcagagcggcgcgctccgaaagtttccttttatggcgaggcggcggcggcggcggccctataaaaagcgaagcgcgcggcgggcgggagcaagcttcgtttagtgaaccgtcagatcgcctggagacgccatccacgctgttttgacctccatagaagacaccgggaccgatccagcctccgcggattcgaatcccggccgggaacggtgcattggaacgcggattccccgtgccaagagtgacgtaagtaccgcctatagagtctataggcccacaaaaaatgctttcttcttttaatatacttttttgtttatcttatttctaatactttccctaatctctttctttcagggcaataatgatacaatgtatcatgcctctttgcaccattctaaagaataacagtgataatttctgggttaaggcaatagcaatatttctgcatataaatatttctgcatataaattgtaactgatgtaagaggtttcatattgctaatagcagctacaatccagctaccattctgcttttattttatggttgggataaggctggattattctgagtccaagctaggcccttttgctaatcatgttcatacctcttatcttcctcccacagctcctgggcaacgtgctggtctgtgtgctggcccatcactttggcaaagaattgggattcgaaccggtgtgctgggcggggggcggcgggccctcccgcagaacaccatgcgctcttcggaagactggaagcgatgacaagcctgtgacctggtttgtcatcgcttccagtcttctgtggagcgccttgacagcagccatgggagggccgccccctacctcagtgactcgaggggtggcatccctgtgacccctccccagtgcctctcctggccctggaagttgccactccagtgcccaccagccttgtcctaataaaattaagttgcatcattttgtctgactaggtgtccttctataatattatggggtggaggggggtggtatggagcaaggggcaagttgggaagacaacctgtagggcctgcggggtctattgggaaccaagctggagtgcagtggcacaatcttggctcactgcaatctccgcctcctgggttcaagcgattctcctgcctcagcctcccgagttgttgggattccaggcatgcatgaccaggctcagctaatttttgtttttttggtagagacggggtttcaccatattggccaggctggtctccaactcctaatctcaggtgatctacccaccttggcctcccaaattgctgggattacaggcgtgaaccactgctcccttccctgtccttatcgatgcctagggttaatcattaactacaaggaacccctagtgatggagttggccactccctctctgcgcgctcgctcgctcactgaggccgggcgaccaaaggtcgcccgacgcccgggctttgcccgggcggcctcagtgagcgagcgagcgcgcag

SEQ ID NO: 5191 - DNA, 2198 bp, synthetic construct
  source 1..2198: mol_type = other DNA
ctgcgcgctcgctcgctcactgaggccgcccgggcaaagcccgggcgtcgggcgacctttggtcgcccggcctcagtgagcgagcgagcgcgcagagagggagtgtagccatgctctaggaagatcaattcaattcacgcgtcgacattgattattgactagttattaatagtaatcaattacggggtcattagttcatagcccatatatggagttccgcgttacataacttacggtaaatggcccgcctggctgaccgcccaacgacccccgcccattgacgtcaataatgacgtatgttcccatagtaacgccaatagggactttccattgacgtcaatgggtggagtatttacggtaaactgcccacttggcagtacatcaagtgtatcatatgccaagtacgccccctattgacgtcaatgacggtaaatggcccgcctggcattatgcccagtacatgaccttatgggactttcctacttggcagtacatctacgtattagtcatcgctattaccatgtcgaggccacgttctgcttcactctccccatctcccccccctccccacccccaattttgtatttatttattttttaattattttgtgcagcgatgggggcggggggggggggcgcgcgccaggcggggcggggcggggcgaggggcggggcggggcgaggcggagaggtgcggcggcagccaatcagagcggcgcgctccgaaagtttccttttatggcgaggcggcggcggcggcggccctataaaaagcgaagcgcgcggcgggcgggagcaagcttcgtttagtgaaccgtcagatcgcctggagacgccatccacgctgttttgacctccatagaagacaccgggaccgatccagcctccgcggattcgaatcccggccgggaacggtgcattggaacgcggattccccgtgccaagagtgacgtaagtaccgcctatagagtctataggcccacaaaaaatgctttcttcttttaatatacttttttgtttatcttatttctaatactttccctaatctctttctttcagggcaataatgatacaatgtatcatgcctctttgcaccattctaaagaataacagtgataatttctgggttaaggcaatagcaatatttctgcatataaatatttctgcatataaattgtaactgatgtaagaggtttcatattgctaatagcagctacaatccagctaccattctgcttttattttatggttgggataaggctggattattctgagtccaagctaggcccttttgctaatcatgttcatacctcttatcttcctcccacagctcctgggcaacgtgctggtctgtgtgctggcccatcactttggcaaagaattgggattcgaaccggtgtgctgggcggggggcggcgggccctcccgcagaacaccatgcgctcttcggaacttccgcgagaacgccaagcctgtgacctggtttggcgttctcgcggaagttctgtggagcgccttgacagcagccatgggagggccgccccctacctcagtgactcgaggggtggcatccctgtgacccctccccagtgcctctcctggccctggaagttgccactccagtgcccaccagccttgtcctaataaaattaagttgcatcattttgtctgactaggtgtccttctataatattatggggtggaggggggtggtatggagcaaggggcaagttgggaagacaacctgtagggcctgcggggtctattgggaaccaagctggagtgcagtggcacaatcttggctcactgcaatctccgcctcctgggttcaagcgattctcctgcctcagcctcccgagttgttgggattccaggcatgcatgaccaggctcagctaatttttgtttttttggtagagacggggtttcaccatattggccaggctggtctccaactcctaatctcaggtgatctacccaccttggcctcccaaattgctgggattacaggcgtgaaccactgctcccttccctgtccttatcgatgcctagggttaatcattaactacaaggaacccctagtgatggagttggccactccctctctgcgcgctcgctcgctcactgaggccgggcgaccaaaggtcgcccgacgcccgggctttgcccgggcggcctcagtgagcgagcgagcgcgcag

SEQ ID NO: 5192 - DNA, 2198 bp, synthetic construct
  source 1..2198: mol_type = other DNA
ctgcgcgctcgctcgctcactgaggccgcccgggcaaagcccgggcgtcgggcgacctttggtcgcccggcctcagtgagcgagcgagcgcgcagagagggagtgtagccatgctctaggaagatcaattcaattcacgcgtcgacattgattattgactagttattaatagtaatcaattacggggtcattagttcatagcccatatatggagttccgcgttacataacttacggtaaatggcccgcctggctgaccgcccaacgacccccgcccattgacgtcaataatgacgtatgttcccatagtaacgccaatagggactttccattgacgtcaatgggtggagtatttacggtaaactgcccacttggcagtacatcaagtgtatcatatgccaagtacgccccctattgacgtcaatgacggtaaatggcccgcctggcattatgcccagtacatgaccttatgggactttcctacttggcagtacatctacgtattagtcatcgctattaccatgtcgaggccacgttctgcttcactctccccatctcccccccctccccacccccaattttgtatttatttattttttaattattttgtgcagcgatgggggcggggggggggggcgcgcgccaggcggggcggggcggggcgaggggcggggcggggcgaggcggagaggtgcggcggcagccaatcagagcggcgcgctccgaaagtttccttttatggcgaggcggcggcggcggcggccctataaaaagcgaagcgcgcggcgggcgggagcaagcttcgtttagtgaaccgtcagatcgcctggagacgccatccacgctgttttgacctccatagaagacaccgggaccgatccagcctccgcggattcgaatcccggccgggaacggtgcattggaacgcggattccccgtgccaagagtgacgtaagtaccgcctatagagtctataggcccacaaaaaatgctttcttcttttaatatacttttttgtttatcttatttctaatactttccctaatctctttctttcagggcaataatgatacaatgtatcatgcctctttgcaccattctaaagaataacagtgataatttctgggttaaggcaatagcaatatttctgcatataaatatttctgcatataaattgtaactgatgtaagaggtttcatattgctaatagcagctacaatccagctaccattctgcttttattttatggttgggataaggctggattattctgagtccaagctaggcccttttgctaatcatgttcatacctcttatcttcctcccacagctcctgggcaacgtgctggtctgtgtgctggcccatcactttggcaaagaattgggattcgaaccggtgtgctgggcggggggcggcgggccctcccgcagaacaccatgcgctcttcggaagctcctcgcagttcggttgcctgtgacctggtaaccgaactgcgaggagcttctgtggagcgccttgacagcagccatgggagggccgccccctacctcagtgactcgaggggtggcatccctgtgacccctccccagtgcctctcctggccctggaagttgccactccagtgcccaccagccttgtcctaataaaattaagttgcatcattttgtctgactaggtgtccttctataatattatggggtggaggggggtggtatggagcaaggggcaagttgggaagacaacctgtagggcctgcggggtctattgggaaccaagctggagtgcagtggcacaatcttggctcactgcaatctccgcctcctgggttcaagcgattctcctgcctcagcctcccgagttgttgggattccaggcatgcatgaccaggctcagctaatttttgtttttttggtagagacggggtttcaccatattggccaggctggtctccaactcctaatctcaggtgatctacccaccttggcctcccaaattgctgggattacaggcgtgaaccactgctcccttccctgtccttatcgatgcctagggttaatcattaactacaaggaacccctagtgatggagttggccactccctctctgcgcgctcgctcgctcactgaggccgggcgaccaaaggtcgcccgacgcccgggctttgcccgggcggcctcagtgagcgagcgagcgcgcag

SEQ ID NO: 5193 - DNA, 2198 bp, synthetic construct
  source 1..2198: mol_type = other DNA
ctgcgcgctcgctcgctcactgaggccgcccgggcaaagcccgggcgtcgggcgacctttggtcgcccggcctcagtgagcgagcgagcgcgcagagagggagtgtagccatgctctaggaagatcaattcaattcacgcgtcgacattgattattgactagttattaatagtaatcaattacggggtcattagttcatagcccatatatggagttccgcgttacataacttacggtaaatggcccgcctggctgaccgcccaacgacccccgcccattgacgtcaataatgacgtatgttcccatagtaacgccaatagggactttccattgacgtcaatgggtggagtatttacggtaaactgcccacttggcagtacatcaagtgtatcatatgccaagtacgccccctattgacgtcaatgacggtaaatggcccgcctggcattatgcccagtacatgaccttatgggactttcctacttggcagtacatctacgtattagtcatcgctattaccatgtcgaggccacgttctgcttcactctccccatctcccccccctccccacccccaattttgtatttatttattttttaattattttgtgcagcgatgggggcggggggggggggcgcgcgccaggcggggcggggcggggcgaggggcggggcggggcgaggcggagaggtgcggcggcagccaatcagagcggcgcgctccgaaagtttccttttatggcgaggcggcggcggcggcggccctataaaaagcgaagcgcgcggcgggcgggagcaagcttcgtttagtgaaccgtcagatcgcctggagacgccatccacgctgttttgacctccatagaagacaccgggaccgatccagcctccgcggattcgaatcccggccgggaacggtgcattggaacgcggattccccgtgccaagagtgacgtaagtaccgcctatagagtctataggcccacaaaaaatgctttcttcttttaatatacttttttgtttatcttatttctaatactttccctaatctctttctttcagggcaataatgatacaatgtatcatgcctctttgcaccattctaaagaataacagtgataatttctgggttaaggcaatagcaatatttctgcatataaatatttctgcatataaattgtaactgatgtaagaggtttcatattgctaatagcagctacaatccagctaccattctgcttttattttatggttgggataaggctggattattctgagtccaagctaggcccttttgctaatcatgttcatacctcttatcttcctcccacagctcctgggcaacgtgctggtctgtgtgctggcccatcactttggcaaagaattgggattcgaaccggtgtgctgggcggggggcggcgggccctcccgcagaacaccatgcgctcttcggaaggctttggctcgggacttgcctgtgacctggtaagtcccgagccaaagccttctgtggagcgccttgacagcagccatgggagggccgccccctacctcagtgactcgaggggtggcatccctgtgacccctccccagtgcctctcctggccctggaagttgccactccagtgcccaccagccttgtcctaataaaattaagttgcatcattttgtctgactaggtgtccttctataatattatggggtggaggggggtggtatggagcaaggggcaagttgggaagacaacctgtagggcctgcggggtctattgggaaccaagctggagtgcagtggcacaatcttggctcactgcaatctccgcctcctgggttcaagcgattctcctgcctcagcctcccgagttgttgggattccaggcatgcatgaccaggctcagctaatttttgtttttttggtagagacggggtttcaccatattggccaggctggtctccaactcctaatctcaggtgatctacccaccttggcctcccaaattgctgggattacaggcgtgaaccactgctcccttccctgtccttatcgatgcctagggttaatcattaactacaaggaacccctagtgatggagttggccactccctctctgcgcgctcgctcgctcactgaggccgggcgaccaaaggtcgcccgacgcccgggctttgcccgggcggcctcagtgagcgagcgagcgcgcag

SEQ ID NO: 5194 - DNA, 2300 bp, synthetic construct
  source 1..2300: mol_type = other DNA
ctgcgcgctcgctcgctcactgaggccgcccgggcaaagcccgggcgtcgggcgacctttggtcgcccggcctcagtgagcgagcgagcgcgcagagagggagtgtagccatgctctaggaagatcaattcaattcacgcgtcgacattgattattgactagttattaatagtaatcaattacggggtcattagttcatagcccatatatggagttccgcgttacataacttacggtaaatggcccgcctggctgaccgcccaacgacccccgcccattgacgtcaataatgacgtatgttcccatagtaacgccaatagggactttccattgacgtcaatgggtggagtatttacggtaaactgcccacttggcagtacatcaagtgtatcatatgccaagtacgccccctattgacgtcaatgacggtaaatggcccgcctggcattatgcccagtacatgaccttatgggactttcctacttggcagtacatctacgtattagtcatcgctattaccatgtcgaggccacgttctgcttcactctccccatctcccccccctccccacccccaattttgtatttatttattttttaattattttgtgcagcgatgggggcggggggggggggcgcgcgccaggcggggcggggcggggcgaggggcggggcggggcgaggcggagaggtgcggcggcagccaatcagagcggcgcgctccgaaagtttccttttatggcgaggcggcggcggcggcggccctataaaaagcgaagcgcgcggcgggcgggagcaagcttcgtttagtgaaccgtcagatcgcctggagacgccatccacgctgttttgacctccatagaagacaccgggaccgatccagcctccgcggattcgaatcccggccgggaacggtgcattggaacgcggattccccgtgccaagagtgacgtaagtaccgcctatagagtctataggcccacaaaaaatgctttcttcttttaatatacttttttgtttatcttatttctaatactttccctaatctctttctttcagggcaataatgatacaatgtatcatgcctctttgcaccattctaaagaataacagtgataatttctgggttaaggcaatagcaatatttctgcatataaatatttctgcatataaattgtaactgatgtaagaggtttcatattgctaatagcagctacaatccagctaccattctgcttttattttatggttgggataaggctggattattctgagtccaagctaggcccttttgctaatcatgttcatacctcttatcttcctcccacagctcctgggcaacgtgctggtctgtgtgctggcccatcactttggcaaagaattgggattcgaaccggtgaagcaaagaaggggcagagggagcccgtgagctgagtgggccagggactgggagaaggagtgaggaggcagggccggcatgcctctgctgctggccagacttccgcgagaacgccaatctgtctgcacctgtcactagtttggcgttctcgcggaagtttggccgtgtagtgctacccagcgctggctgcctcctcagcattgcaattcctctcccatctgggcaccagtcagctaccctggtgggaatctgggtagccctcgaggggtggcatccctgtgacccctccccagtgcctctcctggccctggaagttgccactccagtgcccaccagccttgtcctaataaaattaagttgcatcattttgtctgactaggtgtccttctataatattatggggtggaggggggtggtatggagcaaggggcaagttgggaagacaacctgtagggcctgcggggtctattgggaaccaagctggagtgcagtggcacaatcttggctcactgcaatctccgcctcctgggttcaagcgattctcctgcctcagcctcccgagttgttgggattccaggcatgcatgaccaggctcagctaatttttgtttttttggtagagacggggtttcaccatattggccaggctggtctccaactcctaatctcaggtgatctacccaccttggcctcccaaattgctgggattacaggcgtgaaccactgctcccttccctgtccttatcgatgcctagggttaatcattaactacaaggaacccctagtgatggagttggccactccctctctgcgcgctcgctcgctcactgaggccgggcgaccaaaggtcgcccgacgcccgggctttgcccgggcggcctcagtgagcgagcgagcgcgcag

SEQ ID NO: 5195 - DNA, 2300 bp, synthetic construct
  source 1..2300: mol_type = other DNA
ctgcgcgctcgctcgctcactgaggccgcccgggcaaagcccgggcgtcgggcgacctttggtcgcccggcctcagtgagcgagcgagcgcgcagagagggagtgtagccatgctctaggaagatcaattcaattcacgcgtcgacattgattattgactagttattaatagtaatcaattacggggtcattagttcatagcccatatatggagttccgcgttacataacttacggtaaatggcccgcctggctgaccgcccaacgacccccgcccattgacgtcaataatgacgtatgttcccatagtaacgccaatagggactttccattgacgtcaatgggtggagtatttacggtaaactgcccacttggcagtacatcaagtgtatcatatgccaagtacgccccctattgacgtcaatgacggtaaatggcccgcctggcattatgcccagtacatgaccttatgggactttcctacttggcagtacatctacgtattagtcatcgctattaccatgtcgaggccacgttctgcttcactctccccatctcccccccctccccacccccaattttgtatttatttattttttaattattttgtgcagcgatgggggcggggggggggggcgcgcgccaggcggggcggggcggggcgaggggcggggcggggcgaggcggagaggtgcggcggcagccaatcagagcggcgcgctccgaaagtttccttttatggcgaggcggcggcggcggcggccctataaaaagcgaagcgcgcggcgggcgggagcaagcttcgtttagtgaaccgtcagatcgcctggagacgccatccacgctgttttgacctccatagaagacaccgggaccgatccagcctccgcggattcgaatcccggccgggaacggtgcattggaacgcggattccccgtgccaagagtgacgtaagtaccgcctatagagtctataggcccacaaaaaatgctttcttcttttaatatacttttttgtttatcttatttctaatactttccctaatctctttctttcagggcaataatgatacaatgtatcatgcctctttgcaccattctaaagaataacagtgataatttctgggttaaggcaatagcaatatttctgcatataaatatttctgcatataaattgtaactgatgtaagaggtttcatattgctaatagcagctacaatccagctaccattctgcttttattttatggttgggataaggctggattattctgagtccaagctaggcccttttgctaatcatgttcatacctcttatcttcctcccacagctcctgggcaacgtgctggtctgtgtgctggcccatcactttggcaaagaattgggattcgaaccggtgaagcaaagaaggggcagagggagcccgtgagctgagtgggccagggactgggagaaggagtgaggaggcagggccggcatgcctctgctgctggccagagctcctcgcagttcggtttctgtctgcacctgtcactagtaaccgaactgcgaggagctttggccgtgtagtgctacccagcgctggctgcctcctcagcattgcaattcctctcccatctgggcaccagtcagctaccctggtgggaatctgggtagccctcgaggggtggcatccctgtgacccctccccagtgcctctcctggccctggaagttgccactccagtgcccaccagccttgtcctaataaaattaagttgcatcattttgtctgactaggtgtccttctataatattatggggtggaggggggtggtatggagcaaggggcaagttgggaagacaacctgtagggcctgcggggtctattgggaaccaagctggagtgcagtggcacaatcttggctcactgcaatctccgcctcctgggttcaagcgattctcctgcctcagcctcccgagttgttgggattccaggcatgcatgaccaggctcagctaatttttgtttttttggtagagacggggtttcaccatattggccaggctggtctccaactcctaatctcaggtgatctacccaccttggcctcccaaattgctgggattacaggcgtgaaccactgctcccttccctgtccttatcgatgcctagggttaatcattaactacaaggaacccctagtgatggagttggccactccctctctgcgcgctcgctcgctcactgaggccgggcgaccaaaggtcgcccgacgcccgggctttgcccgggcggcctcagtgagcgagcgagcgcgcag

SEQ ID NO: 5196 - DNA, 2300 bp, synthetic construct
  source 1..2300: mol_type = other DNA
ctgcgcgctcgctcgctcactgaggccgcccgggcaaagcccgggcgtcgggcgacctttggtcgcccggcctcagtgagcgagcgagcgcgcagagagggagtgtagccatgctctaggaagatcaattcaattcacgcgtcgacattgattattgactagttattaatagtaatcaattacggggtcattagttcatagcccatatatggagttccgcgttacataacttacggtaaatggcccgcctggctgaccgcccaacgacccccgcccattgacgtcaataatgacgtatgttcccatagtaacgccaatagggactttccattgacgtcaatgggtggagtatttacggtaaactgcccacttggcagtacatcaagtgtatcatatgccaagtacgccccctattgacgtcaatgacggtaaatggcccgcctggcattatgcccagtacatgaccttatgggactttcctacttggcagtacatctacgtattagtcatcgctattaccatgtcgaggccacgttctgcttcactctccccatctcccccccctccccacccccaattttgtatttatttattttttaattattttgtgcagcgatgggggcggggggggggggcgcgcgccaggcggggcggggcggggcgaggggcggggcggggcgaggcggagaggtgcggcggcagccaatcagagcggcgcgctccgaaagtttccttttatggcgaggcggcggcggcggcggccctataaaaagcgaagcgcgcggcgggcgggagcaagcttcgtttagtgaaccgtcagatcgcctggagacgccatccacgctgttttgacctccatagaagacaccgggaccgatccagcctccgcggattcgaatcccggccgggaacggtgcattggaacgcggattccccgtgccaagagtgacgtaagtaccgcctatagagtctataggcccacaaaaaatgctttcttcttttaatatacttttttgtttatcttatttctaatactttccctaatctctttctttcagggcaataatgatacaatgtatcatgcctctttgcaccattctaaagaataacagtgataatttctgggttaaggcaatagcaatatttctgcatataaatatttctgcatataaattgtaactgatgtaagaggtttcatattgctaatagcagctacaatccagctaccattctgcttttattttatggttgggataaggctggattattctgagtccaagctaggcccttttgctaatcatgttcatacctcttatcttcctcccacagctcctgggcaacgtgctggtctgtgtgctggcccatcactttggcaaagaattgggattcgaaccggtgaagcaaagaaggggcagagggagcccgtgagctgagtgggccagggactgggagaaggagtgaggaggcagggccggcatgcctctgctgctggccagaggctttggctcgggactttctgtctgcacctgtcactagtaagtcccgagccaaagcctttggccgtgtagtgctacccagcgctggctgcctcctcagcattgcaattcctctcccatctgggcaccagtcagctaccctggtgggaatctgggtagccctcgaggggtggcatccctgtgacccctccccagtgcctctcctggccctggaagttgccactccagtgcccaccagccttgtcctaataaaattaagttgcatcattttgtctgactaggtgtccttctataatattatggggtggaggggggtggtatggagcaaggggcaagttgggaagacaacctgtagggcctgcggggtctattgggaaccaagctggagtgcagtggcacaatcttggctcactgcaatctccgcctcctgggttcaagcgattctcctgcctcagcctcccgagttgttgggattccaggcatgcatgaccaggctcagctaatttttgtttttttggtagagacggggtttcaccatattggccaggctggtctccaactcctaatctcaggtgatctacccaccttggcctcccaaattgctgggattacaggcgtgaaccactgctcccttccctgtccttatcgatgcctagggttaatcattaactacaaggaacccctagtgatggagttggccactccctctctgcgcgctcgctcgctcactgaggccgggcgaccaaaggtcgcccgacgcccgggctttgcccgggcggcctcagtgagcgagcgagcgcgcag

SEQ ID NO: 5197 - DNA, 105 bp, synthetic construct
  source 1..105: mol_type = other DNA
ctgcgcgctcgctcgctcactgaggccgcccgggcaaagcccgggcgtcgggcgacctttggtcgcccggcctcagtgagcgagcgagcgcgcagagagggagtg

SEQ ID NO: 5198 - DNA, 380 bp, synthetic construct; identical to SEQ ID NO: 4471
  source 1..380: mol_type = other DNA

SEQ ID NO: 5199 - DNA, 267 bp, synthetic construct
  source 1..267: mol_type = other DNA
ccacgttctgcttcactctccccatctcccccccctccccacccccaattttgtatttatttattttttaattattttgtgcagcgatgggggcggggggggggggcgcgcgccaggcggggcggggcggggcgaggggcggggcggggcgaggcggagaggtgcggcggcagccaatcagagcggcgcgctccgaaagtttccttttatggcgaggcggcggcggcggcggccctataaaaagcgaagcgcgcggcgggcgggagc

SEQ ID NO: 5200 - DNA, 130 bp, synthetic construct
  source 1..130: mol_type = other DNA
aggaacccctagtgatggagttggccactccctctctgcgcgctcgctcgctcactgaggccgggcgaccaaaggtcgcccgacgcccgggctttgcccgggcggcctcagtgagcgagcgagcgcgcag

We claim:

1. A short interfering ribonucleic acid (siRNA) for inhibiting expression of microtubule-associated protein tau (MAPT) which comprises a sense strand sequence and an antisense strand sequence, wherein:
(i) the antisense strand sequence comprises at least 20 or 21 contiguous nucleotides of any one of SEQ ID NOs: 4908, 4920, 4924, 5057, 4916, 4912, 5080, 5104, or 5128; and
(ii) the sense strand sequence comprises at least 20 or 21 contiguous nucleotides of any one of SEQ ID NOs: 4906, 4926, 4946, 4966, 4986, 5006, 4918, 4938, 4958, 4978, 4998, 4922, 4942, 4962, 4982, 5002, 5022, 5054, 5060, 5064, 5066, 5070, 5074, 4914, 4934, 4954, 4974, 4994, 5014, 4910, 4930, 4950, 4970, 4990, 5010, 5077, 5084, 5088, 5092, 5096, 5098, 5101, 5108, 5112, 5116, 5120, 5122, 5125, 5132, 5136, 5140, 5144, or 5146;
wherein the sense strand sequence and the antisense strand sequence comprise a region of complementarity of at least 15, 16, 17, 18, 19, or 20 nucleotides.

2. An adeno-associated virus (AAV) viral genome comprising a nucleotide sequence positioned between two inverted terminal repeats (ITRs), wherein the nucleotide sequence encodes an siRNA for inhibiting MAPT, wherein the siRNA comprises a sense strand sequence and an antisense strand sequence, wherein:
(i) the antisense strand sequence comprises at least 19, 20, or 21 contiguous nucleotides of any one of SEQ ID NOs: 4908, 4920, 4924, 5057, 4916, 4912, 5080, 5104, or 5128; and
(ii) the sense strand sequence comprises at least 19, 20, or 21 contiguous nucleotides of any one of SEQ ID NOs: 4906, 4926, 4946, 4966, 4986, 5006, 4918, 4938, 4958, 4978, 4998, 4922, 4942, 4962, 4982, 5002, 5022, 5054, 5060, 5064, 5066, 5070, 5074, 4914, 4934, 4954, 4974, 4994, 5014, 4910, 4930, 4950, 4970, 4990, 5010, 5077, 5084, 5088, 5092, 5096, 5098, 5101, 5108, 5112, 5116, 5120, 5122, 5125, 5132, 5136, 5140, 5144, or 5146;
wherein the sense strand sequence and the antisense strand sequence comprise a region of complementarity of at least 15, 16, 17, 18, 19, or 20 nucleotides.

3. The siRNA of claim 1, or the AAV viral genome of claim 2, wherein:
(i) the antisense strand comprises at least 20 contiguous nucleotides of any one of SEQ ID NOS:
4908, 4920, 4924, or 4912; and/or the sense strand comprises at least 20 contiguous nucleotides of any one of SEQ ID NOs: 4906, 4926, 4946, 4966, 4986, 5006, 4918, 4938, 4958, 4978, 4998, 4922, 4942, 4962, 4982, 5002, 5022, 4910, 4930, 4950, 4970, 4990, or 5010;
(ii) the antisense strand sequence comprises at least 20 contiguous nucleotides from the nucleotide sequence of SEQ ID NO: 4908 and the sense strand sequence comprises at least 20 contiguous nucleotides from the nucleotide sequence of any one of SEQ ID NOs: 4906, 4926, 4946, 4966, 4986, or 5006;
(iii) the antisense strand sequence comprises at least 20 contiguous nucleotides from the nucleotide sequence of SEQ ID NO: 4920 and the sense strand sequence comprises at least 20 contiguous nucleotides from the nucleotide sequence of any one of SEQ ID NOs: 4918, 4938, 4958, 4978, or 4998;
(iv) the antisense strand sequence comprises at least 20 contiguous nucleotides from the nucleotide sequence of SEQ ID NO: 4924 and the sense strand sequence comprises at least 20 contiguous nucleotides from the nucleotide sequence of any one of SEQ ID NOs: 4922, 4942, 4962, 4982, 5002, or 5022;
(v) the antisense strand sequence comprises at least 20 contiguous nucleotides from the nucleotide sequence of SEQ ID NO: 4912 and the sense strand sequence comprises at least 20 contiguous nucleotides from the nucleotide sequence of any one of SEQ ID NOs: 4910, 4930, 4950, 4970, 4990, or 5010;
(vi) the antisense strand sequence comprises at least 20 contiguous nucleotides from the nucleotide sequence of SEQ ID NO: 4916 and the sense strand sequence comprises at least 20 contiguous nucleotides from the nucleotide sequence of any one of SEQ ID NOs: 4914, 4934, 4954, 4974, 4994, or 5014;
(vii) the antisense strand sequence comprises at least 20 contiguous nucleotides from the nucleotide sequence of SEQ ID NO: 5104; and the sense strand sequence comprises at least 20 contiguous nucleotides from the nucleotide sequence of any one of SEQ ID NOs: 5101, 5108, 5112, 5116, 5120, or 5122;
(viii) the antisense strand sequence comprises at least 20 contiguous nucleotides from the nucleotide sequence of SEQ ID NO: 5128; and the sense strand sequence comprises at least 20 contiguous nucleotides from the nucleotide sequence of any one of SEQ ID NOs: 5125, 5132, 5136, 5140, 5144, or 5146;
(ix) the antisense strand sequence comprises at least 20 contiguous nucleotides from the nucleotide sequence of SEQ ID NO: 5080; and the sense strand sequence comprises at least 20 contiguous nucleotides from the nucleotide sequence of any one of SEQ ID NOs: 5077, 5084, 5088, 5092, 5096, or 5098; or
(x) the antisense strand sequence comprises at least 20 contiguous nucleotides from the nucleotide sequence of SEQ ID NO: 5057; and the sense strand sequence comprises at least 20 contiguous nucleotides from the nucleotide sequence of any one of SEQ ID NOs: 5054, 5060, 5064, 5066, 5070, or 5074.

4. The siRNA of claim 1 or 3, or the AAV viral genome of claim 2 or 3, wherein:
(i) the antisense strand sequence comprises at least 20 contiguous nucleotides from the nucleotide sequence of SEQ ID NO: 4908 and the sense strand sequence comprises at least 20 contiguous nucleotides from the nucleotide sequence of SEQ ID NO: 4906;
(ii) the antisense strand sequence comprises at least 20 contiguous nucleotides from the nucleotide sequence of SEQ ID NO: 4920 and the sense strand sequence comprises at least 20 contiguous nucleotides from the nucleotide sequence of SEQ ID NO: 4918;
(iii) the antisense strand sequence comprises at least 20 contiguous nucleotides from the nucleotide sequence of SEQ ID NO: 4924 and the sense strand sequence comprises at least 20 contiguous nucleotides from the nucleotide sequence of SEQ ID NO: 4922;
(iv) the antisense strand sequence comprises at least 20 contiguous nucleotides from the nucleotide sequence of SEQ ID NO: 4908 and the sense strand sequence comprises at least 20 contiguous nucleotides from the nucleotide sequence of SEQ ID NO: 4966;
(v) the antisense strand sequence comprises at least 20 contiguous nucleotides from the nucleotide sequence of SEQ ID NO: 4912 and the sense strand sequence comprises at least 20 contiguous nucleotides from the nucleotide sequence of SEQ ID NO: 4970;
(vi) the antisense strand sequence comprises at least 20 contiguous nucleotides from the nucleotide sequence of SEQ ID NO: 4920 and the sense strand sequence comprises at least 20 contiguous nucleotides from the nucleotide sequence of SEQ ID NO: 4978;
(vii) the antisense strand sequence comprises at least 20 contiguous nucleotides from the nucleotide sequence of SEQ ID NO: 4924 and the sense strand sequence comprises at least 20 contiguous nucleotides from the nucleotide sequence of SEQ ID NO: 4982;
(viii) the antisense strand sequence comprises at least 20 contiguous nucleotides from the nucleotide sequence of SEQ ID NO: 4912; and the sense strand sequence comprises at least 20 contiguous nucleotides from the nucleotide sequence of SEQ ID NO: 4910;
(ix) the antisense strand sequence comprises at least 20 contiguous nucleotides from the nucleotide sequence of SEQ ID NO: 4916; and the sense strand sequence comprises at least 20 contiguous nucleotides from the nucleotide sequence of SEQ ID NO: 4914;
(x) the antisense strand sequence comprises at least 20 contiguous nucleotides from the nucleotide sequence of SEQ ID NO: 5057; and the sense strand sequence comprises at least 20 contiguous nucleotides from the nucleotide sequence of SEQ ID NO: 5054;
(xi) the antisense strand sequence comprises at least 20 contiguous nucleotides from the nucleotide sequence of SEQ ID NO: 4908; and the sense strand sequence comprises at least 20 contiguous nucleotides from the nucleotide sequence of SEQ ID NO: 4926;
(xii) the antisense strand sequence comprises at least 20 contiguous nucleotides from the nucleotide sequence of SEQ ID NO: 4912; and the sense strand sequence comprises at least 20 contiguous nucleotides from the nucleotide sequence of SEQ ID NO: 4930;
(xiii) the antisense strand sequence comprises at least 20 contiguous nucleotides from the nucleotide sequence of SEQ ID NO: 4916; and the sense strand sequence comprises at least 20 contiguous nucleotides from the nucleotide sequence of SEQ ID NO: 4934;
(xiv) the antisense strand sequence comprises at least 20 contiguous nucleotides from the nucleotide sequence of SEQ ID NO: 4920; and the sense strand sequence comprises at least 20 contiguous nucleotides from the nucleotide sequence of SEQ ID NO: 4938;
(xv) the antisense strand sequence comprises at least 20 contiguous nucleotides from the nucleotide sequence of SEQ ID NO: 4924; and the sense strand sequence comprises at least 20 contiguous nucleotides from the nucleotide sequence of SEQ ID NO: 4942;
(xvi) the antisense strand sequence comprises at least 20 contiguous nucleotides from the nucleotide sequence of SEQ ID NO: 5057; and the sense strand sequence comprises at least 20 contiguous nucleotides from the nucleotide sequence of SEQ ID NO: 5060;
(xvii) the antisense strand sequence comprises at least 20 contiguous nucleotides from the nucleotide sequence of SEQ ID NO: 4908; and the sense strand sequence comprises at least 20 contiguous nucleotides from the nucleotide sequence of SEQ ID NO: 4946;
(xviii) the antisense strand sequence comprises at least 20 contiguous nucleotides from the nucleotide sequence of SEQ ID NO: 4912; and the sense strand sequence comprises at least 20 contiguous nucleotides from the nucleotide sequence of SEQ ID NO: 4950;
(xix) the antisense strand sequence comprises at least 20 contiguous nucleotides from the nucleotide sequence of SEQ ID NO: 4916; and the sense strand sequence comprises at least 20 contiguous nucleotides from the nucleotide sequence of SEQ ID NO: 4954;
(xx) the antisense strand sequence comprises at least 20 contiguous nucleotides from the nucleotide sequence of SEQ ID NO: 4920; and the sense strand sequence comprises at least 20 contiguous nucleotides from the nucleotide sequence of SEQ ID NO: 4958;
(xxi) the antisense strand sequence comprises at least 20 contiguous nucleotides from the nucleotide sequence of SEQ ID NO: 4924; and the sense strand sequence comprises at least 20 contiguous nucleotides from the nucleotide sequence of SEQ ID NO: 4962;
(xxii) the antisense strand sequence comprises at least 20 contiguous nucleotides from the nucleotide sequence of SEQ ID NO: 5057; and the sense strand sequence comprises at least 20 contiguous nucleotides from the nucleotide sequence of SEQ ID NO: 5064;
(xxiii) the antisense strand sequence comprises at least 20 contiguous nucleotides from the nucleotide sequence of SEQ ID NO: 4916; and the sense strand sequence comprises at least 20 contiguous nucleotides from the nucleotide sequence of SEQ ID NO: 4974;
(xxiv) the antisense strand sequence comprises at least 20 contiguous nucleotides from the nucleotide sequence of SEQ ID NO: 5057; and the sense strand sequence comprises at least 20 contiguous nucleotides from the nucleotide sequence of SEQ ID NO: 5066;
(xxv) the antisense strand sequence comprises at least 20 contiguous nucleotides from the nucleotide sequence of SEQ ID NO: 4908; and the sense strand sequence comprises at least 20 contiguous nucleotides from the nucleotide sequence of SEQ ID NO: 4986;
(xxvi) the antisense strand sequence comprises at least 20 contiguous nucleotides from the nucleotide sequence of SEQ ID NO: 4912; and the sense strand sequence comprises at least 20 contiguous nucleotides from the nucleotide sequence of SEQ ID NO: 4990;
(xxvii) the antisense strand sequence comprises at least 20 contiguous nucleotides from the nucleotide sequence of SEQ ID NO: 4916; and the sense strand sequence comprises at least 20 contiguous nucleotides from the nucleotide sequence of SEQ ID NO: 4994;
(xxviii) the antisense strand sequence comprises at least 20 contiguous nucleotides from the nucleotide sequence of SEQ ID NO: 4920; and the sense strand sequence comprises at least 20 contiguous nucleotides from the nucleotide sequence of SEQ ID NO: 4998;
(xxix) the antisense strand sequence comprises at least 20 contiguous nucleotides from the nucleotide sequence of SEQ ID NO: 4924; and the sense strand sequence comprises at least 20 contiguous nucleotides from the nucleotide sequence of SEQ ID NO: 5002;
(xxx) the antisense strand sequence comprises at least 20 contiguous nucleotides from the nucleotide sequence of SEQ ID NO: 5057; and the sense strand sequence comprises at least 20 contiguous nucleotides from the nucleotide sequence of SEQ ID NO: 5070;
(xxxi) the antisense strand sequence comprises at least 20 contiguous nucleotides from the nucleotide sequence of SEQ ID NO: 4908; and the sense strand sequence comprises at least 20 contiguous nucleotides from the nucleotide sequence of SEQ ID NO: 5006;
(xxxii) the antisense strand sequence comprises at least 20 contiguous nucleotides from the nucleotide sequence of SEQ ID NO: 4912; and the sense strand sequence comprises at least 20 contiguous nucleotides from the nucleotide sequence of SEQ ID NO: 5010;
(xxxiii) the antisense strand sequence comprises at least 20 contiguous nucleotides from the nucleotide sequence of SEQ ID NO: 4916; and the sense strand sequence comprises at least 20 contiguous nucleotides from the nucleotide sequence of SEQ ID NO: 5014;
(xxxiv) the antisense strand sequence comprises at least 20 contiguous nucleotides from the nucleotide sequence of SEQ ID NO: 4920; and the sense strand sequence comprises at least 20 contiguous nucleotides from the nucleotide sequence of SEQ ID NO: 4958;
(xxxv) the antisense strand sequence comprises at least 20 contiguous nucleotides from the nucleotide sequence of SEQ ID NO: 4924; and the sense strand sequence comprises at least 20 contiguous nucleotides from the nucleotide sequence of SEQ ID NO: 5022;
(xxxvi) the antisense strand sequence comprises at least 20 contiguous nucleotides from the nucleotide sequence of SEQ ID NO: 5057; and the sense strand sequence comprises at least 20 contiguous nucleotides from the nucleotide sequence of SEQ ID NO: 5074;
(xxxvii) the antisense strand sequence comprises at least 20 contiguous nucleotides from the nucleotide sequence of SEQ ID NO: 5080; and the sense strand sequence comprises at least 20 contiguous nucleotides from the nucleotide sequence of SEQ ID NO: 5077;
(xxxviii) the antisense strand sequence comprises at least 20 contiguous nucleotides from the nucleotide sequence of SEQ ID NO: 5080; and the sense strand sequence comprises at least 20 contiguous nucleotides from the nucleotide sequence of SEQ ID NO: 5084;
(xxxix) the antisense strand sequence comprises at least 20 contiguous nucleotides from the nucleotide sequence of SEQ ID NO: 5080; and the sense strand sequence comprises at least 20 contiguous nucleotides from the nucleotide sequence of SEQ ID NO: 5088;
(xl) the antisense strand sequence comprises at least 20 contiguous nucleotides from the nucleotide sequence of SEQ ID NO: 5080; and the sense strand sequence comprises at least 20 contiguous nucleotides from the nucleotide sequence of SEQ ID NO: 5092;
(xli) the antisense strand sequence comprises at least 20 contiguous nucleotides from the nucleotide sequence of SEQ ID NO: 5080; and the sense strand sequence comprises at least 20 contiguous nucleotides from the nucleotide sequence of SEQ ID NO: 5096;
(xlii) the antisense strand sequence comprises at least 20 contiguous nucleotides from the nucleotide sequence of SEQ ID NO: 5080; and the sense strand sequence comprises at least 20 contiguous nucleotides from the nucleotide sequence of SEQ ID NO: 5098;
(xliii) the antisense strand sequence comprises at least 20 contiguous nucleotides from the nucleotide sequence of SEQ ID NO: 5104; and the sense strand sequence comprises at least 20 contiguous nucleotides from the nucleotide sequence of SEQ ID NO: 5101;
(xliv) the antisense strand sequence comprises at least 20 contiguous nucleotides from the nucleotide sequence of SEQ ID NO: 5104; and the sense strand sequence comprises at least 20 contiguous nucleotides from the nucleotide sequence of SEQ ID NO: 5108;
(xlv) the antisense strand sequence comprises at least 20 contiguous nucleotides from the nucleotide sequence of SEQ ID NO: 5104; and the sense strand sequence comprises at least 20 contiguous nucleotides from the nucleotide sequence of SEQ ID NO: 5112;
(xlvi) the antisense strand sequence comprises at least 20 contiguous nucleotides from the nucleotide sequence of SEQ ID NO: 5104; and the sense strand sequence comprises at least 20 contiguous nucleotides from the nucleotide sequence of SEQ ID NO: 5116;
(xlvii) the antisense strand sequence comprises at least 20 contiguous nucleotides from the nucleotide sequence of SEQ ID NO: 5104; and the sense strand sequence comprises at least 20 contiguous nucleotides from the nucleotide sequence of SEQ ID NO: 5120;
(xlviii) the antisense strand sequence comprises at least 20 contiguous nucleotides from the nucleotide sequence of SEQ ID NO: 5104; and the sense strand sequence comprises at least 20 contiguous nucleotides from the nucleotide sequence of SEQ ID NO: 5122;
(xlix) the antisense strand sequence comprises at least 20 contiguous nucleotides from the nucleotide sequence of SEQ ID NO: 5128; and the sense strand sequence comprises at least 20 contiguous nucleotides from the nucleotide sequence of SEQ ID NO: 5125;
(l) the antisense strand sequence comprises at least 20 contiguous nucleotides from the nucleotide sequence of SEQ ID NO: 5128; and the sense strand sequence comprises at least 20 contiguous nucleotides from the nucleotide sequence of SEQ ID NO: 5132;
(li) the antisense strand sequence comprises at least 20 contiguous nucleotides from the nucleotide sequence of SEQ ID NO: 5128; and the sense strand sequence comprises at least 20 contiguous nucleotides from the nucleotide sequence of SEQ ID NO: 5136;
(lii) the antisense strand sequence comprises at least 20 contiguous nucleotides from the nucleotide sequence of SEQ ID NO: 5128; and the sense strand sequence comprises at least 20 contiguous nucleotides from the nucleotide sequence of SEQ ID NO: 5140;
(liii) the antisense strand sequence comprises at least 20 contiguous nucleotides from the nucleotide sequence of SEQ ID NO: 5128; and the sense strand sequence comprises at least 20 contiguous nucleotides from the nucleotide sequence of SEQ ID NO: 5144; or
(liv) the antisense strand sequence comprises at least 20 contiguous nucleotides from the nucleotide sequence of SEQ ID NO: 5128; and the sense strand sequence comprises at least 20 contiguous nucleotides from the nucleotide sequence of SEQ ID NO: 5146.

5. The siRNA of any one of claim 1, 3, or 4, or the AAV viral genome of any one of claims 2-4, wherein:
(i) the antisense strand comprises the nucleotide sequence of any one of SEQ ID NOs: 4908, 4920, 4924, or 4912; and/or the sense strand comprises at the nucleotide sequence of any one of SEQ ID NOs: 4906, 4926, 4946, 4966, 4986, 5006, 4918, 4938, 4958, 4978, 4998, 4922, 4942, 4962, 4982, 5002, 5022, 4910, 4930, 4950, 4970, 4990, or 5010;
(ii) the antisense strand sequence comprises the nucleotide sequence of SEQ ID NO: 4908 and the sense strand sequence comprises the nucleotide sequence of any one of SEQ ID NOs: 4906, 4926, 4946, 4966, 4986, or 5006;
(iii) the antisense strand sequence comprises the nucleotide sequence of SEQ ID NO: 4920 and the sense strand sequence comprises the nucleotide sequence of any one of SEQ ID NOs: 4918, 4938, 4958, 4978, or 4998;
(iv) the antisense strand sequence comprises the nucleotide sequence of SEQ ID NO: 4924 and the sense strand sequence comprises the nucleotide sequence of any one of SEQ ID NOs: 4922, 4942, 4962, 4982, 5002, or 5022;
(v) the antisense strand sequence comprises the nucleotide sequence of SEQ ID NO: 4912 and the sense strand sequence comprises the nucleotide sequence of any one of SEQ ID NOs: 4910, 4930, 4950, 4970, 4990, or 5010;
(vi) the antisense strand sequence comprises the nucleotide sequence of SEQ ID NO: 4916 and the sense strand sequence comprises the nucleotide sequence of any one of SEQ ID NOs: 4914, 4934, 4954, 4974, 4994, or 5014;
(vii) the antisense strand sequence comprises the nucleotide sequence of SEQ ID NO: 5104; and the sense strand sequence comprises the nucleotide sequence of any one of SEQ ID NOs: 5101, 5108, 5112, 5116, 5120, or 5122;
(viii) the antisense strand sequence comprises the nucleotide sequence of SEQ ID NO: 5128; and the sense strand sequence comprises the nucleotide sequence of any one of SEQ ID NOs: 5125, 5132, 5136, 5140, 5144, or 5146;
(ix) the antisense strand sequence comprises the nucleotide sequence of SEQ ID NO: 5080; and the sense strand sequence comprises the nucleotide sequence of any one of SEQ ID NOs: 5077, 5084, 5088, 5092, 5096, or 5098; or
(x) the antisense strand sequence comprises the nucleotide sequence of SEQ ID NO: 5057; and the sense strand sequence comprises the nucleotide sequence of any one of SEQ ID NOs: 5054, 5060, 5064, 5066, 5070, or 5074.

6. The siRNA of any one of claim 1 or 3-5, or the AAV viral genome of any one of claims 2-5, wherein:
(i) the antisense strand sequence comprises the nucleotide sequence of SEQ ID NO: 4908 and the sense strand sequence comprises the nucleotide sequence of SEQ ID NO: 4906;
(ii) the antisense strand sequence comprises the nucleotide sequence of SEQ ID NO: 4920 and the sense strand sequence comprises the nucleotide sequence of SEQ ID NO: 4918;
(iii) the antisense strand sequence comprises the nucleotide sequence of SEQ ID NO: 4924 and the sense strand sequence comprises the nucleotide sequence of SEQ ID NO: 4922;
(iv) the antisense strand sequence comprises the nucleotide sequence of SEQ ID NO: 4908 and the sense strand sequence comprises the nucleotide sequence of SEQ ID NO: 4966;
(v) the antisense strand sequence comprises the nucleotide sequence of SEQ ID NO: 4912 and the sense strand sequence comprises the nucleotide sequence of SEQ ID NO: 4970;
(vi) the antisense strand sequence comprises the nucleotide sequence of SEQ ID NO: 4920 and the sense strand sequence comprises the nucleotide sequence of SEQ ID NO: 4978;
(vii) the antisense strand sequence comprises the nucleotide sequence of SEQ ID NO: 4924 and the sense strand sequence comprises the nucleotide sequence of SEQ ID NO: 4982;
(viii) the antisense strand sequence comprises the nucleotide sequence of SEQ ID NO: 4912; and the sense strand sequence comprises the nucleotide sequence of SEQ ID NO: 4910;
(ix) the antisense strand sequence comprises the nucleotide sequence of SEQ ID NO: 4916; and the sense strand sequence comprises the nucleotide sequence of SEQ ID NO: 4914;
(x) the antisense strand sequence comprises the nucleotide sequence of SEQ ID NO: 5057; and the sense strand sequence comprises the nucleotide sequence of SEQ ID NO: 5054;
(xi) the antisense strand sequence comprises the nucleotide sequence of SEQ ID NO: 4908; and the sense strand sequence comprises the nucleotide sequence of SEQ ID NO: 4926;
(xii) the antisense strand sequence comprises the nucleotide sequence of SEQ ID NO: 4912; and the sense strand sequence comprises the nucleotide sequence of SEQ ID NO: 4930;
(xiii) the antisense strand sequence comprises the nucleotide sequence of SEQ ID NO: 4916; and the sense strand sequence comprises the nucleotide sequence of SEQ ID NO: 4934;
(xiv) the antisense strand sequence comprises the nucleotide sequence of SEQ ID NO: 4920; and the sense strand sequence comprises the nucleotide sequence of SEQ ID NO: 4938;
(xv) the antisense strand sequence comprises the nucleotide sequence of SEQ ID NO: 4924; and the sense strand sequence comprises the nucleotide sequence of SEQ ID NO: 4942;
(xvi) the antisense strand sequence comprises the nucleotide sequence of SEQ ID NO: 5057; and the sense strand sequence comprises the nucleotide sequence of SEQ ID NO: 5060;
(xvii) the antisense strand sequence comprises the nucleotide sequence of SEQ ID NO: 4908; and the sense strand sequence comprises the nucleotide sequence of SEQ ID NO: 4946;
(xviii) the antisense strand sequence comprises the nucleotide sequence of SEQ ID NO: 4912; and the sense strand sequence comprises the nucleotide sequence of SEQ ID NO: 4950;
(xix) the antisense strand sequence comprises the nucleotide sequence of SEQ ID NO: 4916; and the sense strand sequence comprises the nucleotide sequence of SEQ ID NO: 4954;
(xx) the antisense strand sequence comprises the nucleotide sequence of SEQ ID NO: 4920; and the sense strand sequence comprises the nucleotide sequence of SEQ ID NO: 4958;
(xxi) the antisense strand sequence comprises the nucleotide sequence of SEQ ID NO: 4924; and the sense strand sequence comprises the nucleotide sequence of SEQ ID NO: 4962;
(xxii) the antisense strand sequence comprises the nucleotide sequence of SEQ ID NO: 5057; and the sense strand sequence comprises the nucleotide sequence of SEQ ID NO: 5064;
(xxiii) the antisense strand sequence comprises the nucleotide sequence of SEQ ID NO: 4916; and the sense strand sequence comprises the nucleotide sequence of SEQ ID NO: 4974;
(xxiv) the antisense strand sequence comprises the nucleotide sequence of SEQ ID NO: 5057; and the sense strand sequence comprises the nucleotide sequence of SEQ ID NO: 5066;
(xxv) the antisense strand sequence comprises the nucleotide sequence of SEQ ID NO: 4908; and the sense strand sequence comprises the nucleotide sequence of SEQ ID NO: 4986;
(xxvi) the antisense strand sequence comprises the nucleotide sequence of SEQ ID NO: 4912; and the sense strand sequence comprises the nucleotide sequence of SEQ ID NO: 4990;
(xxvii) the antisense strand sequence comprises the nucleotide sequence of SEQ ID NO: 4916; and the sense strand sequence comprises the nucleotide sequence of SEQ ID NO: 4994;
(xxviii) the antisense strand sequence comprises the nucleotide sequence of SEQ ID NO: 4920; and the sense strand sequence comprises the nucleotide sequence of SEQ ID NO: 4998;
(xxix) the antisense strand sequence comprises the nucleotide sequence of SEQ ID NO: 4924; and the sense strand sequence comprises the nucleotide sequence of SEQ ID NO: 5002;
(xxx) the antisense strand sequence comprises the nucleotide sequence of SEQ ID NO: 5057; and the sense strand sequence comprises the nucleotide sequence of SEQ ID NO: 5070;
(xxxi) the antisense strand sequence comprises the nucleotide sequence of SEQ ID NO: 4908; and the sense strand sequence comprises the nucleotide sequence of SEQ ID NO: 5006;
(xxxii) the antisense strand sequence comprises the nucleotide sequence of SEQ ID NO: 4912; and the sense strand sequence comprises the nucleotide sequence of SEQ ID NO: 5010;
(xxxiii) the antisense strand sequence comprises the nucleotide sequence of SEQ ID NO: 4916; and the sense strand sequence comprises the nucleotide sequence of SEQ ID NO: 5014;
(xxxiv) the antisense strand sequence comprises the nucleotide sequence of SEQ ID NO: 4920; and the sense strand sequence comprises the nucleotide sequence of SEQ ID NO: 4958;
(xxxv) the antisense strand sequence comprises the nucleotide sequence of SEQ ID NO: 4924; and the sense strand sequence comprises the nucleotide sequence of SEQ ID NO: 5022;
(xxxvi) the antisense strand sequence comprises the nucleotide sequence of SEQ ID NO: 5057; and the sense strand sequence comprises the nucleotide sequence of SEQ ID NO: 5074;
(xxxvii) the antisense strand sequence comprises the nucleotide sequence of SEQ ID NO: 5080; and the sense strand sequence comprises the nucleotide sequence of SEQ ID NO: 5077;
(xxxviii) the antisense strand sequence comprises the nucleotide sequence of SEQ ID NO: 5080; and the sense strand sequence comprises the nucleotide sequence of SEQ ID NO: 5084;
(xxxix) the antisense strand sequence comprises the nucleotide sequence of SEQ ID NO: 5080; and the sense strand sequence comprises the nucleotide sequence of SEQ ID NO: 5088;
(xl) the antisense strand sequence comprises the nucleotide sequence of SEQ ID NO: 5080; and the sense strand sequence comprises the nucleotide sequence of SEQ ID NO: 5092;
(xli) the antisense strand sequence comprises the nucleotide sequence of SEQ ID NO: 5080; and the sense strand sequence comprises the nucleotide sequence of SEQ ID NO: 5096;
(xlii) the antisense strand sequence comprises the nucleotide sequence of SEQ ID NO: 5080; and the sense strand sequence comprises the nucleotide sequence of SEQ ID NO: 5098;
(xliii) the antisense strand sequence comprises the nucleotide sequence of SEQ ID NO: 5104; and the sense strand sequence comprises the nucleotide sequence of SEQ ID NO: 5101;
(xliv) the antisense strand sequence comprises the nucleotide sequence of SEQ ID NO: 5104; and the sense strand sequence comprises the nucleotide sequence of SEQ ID NO: 5108;
(xlv) the antisense strand sequence comprises the nucleotide sequence of SEQ ID NO: 5104; and the sense strand sequence comprises the nucleotide sequence of SEQ ID NO: 5112;
(xlvi) the antisense strand sequence comprises the nucleotide sequence of SEQ ID NO: 5104; and the sense strand sequence comprises the nucleotide sequence of SEQ ID NO: 5116;
(xlvii) the antisense strand sequence comprises the nucleotide sequence of SEQ ID NO: 5104; and the sense strand sequence comprises the nucleotide sequence of SEQ ID NO: 5120;
(xlviii) the antisense strand sequence comprises the nucleotide sequence of SEQ ID NO: 5104; and the sense strand sequence comprises the nucleotide sequence of SEQ ID NO: 5122;
(xlix) the antisense strand sequence comprises the nucleotide sequence of SEQ ID NO: 5128; and the sense strand sequence comprises the nucleotide sequence of SEQ ID NO: 5125;
(l) the antisense strand sequence comprises the nucleotide sequence of SEQ ID NO: 5128; and the sense strand sequence comprises the nucleotide sequence of SEQ ID NO: 5132;
(li) the antisense strand sequence comprises the nucleotide sequence of SEQ ID NO: 5128; and the sense strand sequence comprises the nucleotide sequence of SEQ ID NO: 5136;
(lii) the antisense strand sequence comprises the nucleotide sequence of SEQ ID NO: 5128; and the sense strand sequence comprises the nucleotide sequence of SEQ ID NO: 5140;
(liii) the antisense strand sequence comprises the nucleotide sequence of SEQ ID NO: 5128; and the sense strand sequence comprises the nucleotide sequence of SEQ ID NO: 5144; or
(liv) the antisense strand sequence comprises the nucleotide sequence of SEQ ID NO: 5128; and the sense strand sequence comprises the nucleotide sequence of SEQ ID NO: 5146.

7. The siRNA of any one of claim 1 or 3-6, or the AAV viral genome of any one of claims 2-6, wherein:
(i) the nucleotide sequence encoding the antisense strand sequence comprises the nucleotide sequence of SEQ ID NO: 4907 and the nucleotide sequence encoding the sense strand sequence comprises the nucleotide sequence of SEQ ID NO: 4905;
(ii) the nucleotide sequence encoding the antisense strand sequence comprises the nucleotide sequence of SEQ ID NO: 4919 and the nucleotide sequence encoding the sense strand sequence comprises the nucleotide sequence of SEQ ID NO: 4917;
(iii) the nucleotide sequence encoding the antisense strand sequence comprises the nucleotide sequence of SEQ ID NO: 4923 and the nucleotide sequence encoding the sense strand sequence comprises the nucleotide sequence of SEQ ID NO: 4921;
(iv) the nucleotide sequence encoding the antisense strand sequence comprises the nucleotide sequence of SEQ ID NO: 4907 and the nucleotide sequence encoding the sense strand sequence comprises the nucleotide sequence of SEQ ID NO: 4965;
(v) the nucleotide sequence encoding the antisense strand sequence comprises the nucleotide sequence of SEQ ID NO: 4911 and the nucleotide sequence encoding the sense strand sequence comprises the nucleotide sequence of SEQ ID NO: 4969;
(vi) the nucleotide sequence encoding the antisense strand sequence comprises the nucleotide sequence of SEQ ID NO: 4919 and the nucleotide sequence encoding the sense strand sequence comprises the nucleotide sequence of SEQ ID NO: 4977; or
(vii) the nucleotide sequence encoding the antisense strand sequence comprises the nucleotide sequence of SEQ ID NO: 4923 and the nucleotide sequence encoding the sense strand sequence comprises the nucleotide sequence of SEQ ID NO: 4981.

8. The siRNA of any one of claim 1 or 3-7, or the AAV viral genome of any one of claims 2-7, wherein:
(i) the sense strand sequence, the antisense strand sequence, or both the sense strand sequence and the antisense strand sequence comprise at least 15-30, 19-21, or 25-30 nucleotides in length, e.g., 17, 18, 20, 21, 22, 25, or 30 nucleotides in length;
(ii) the sense strand sequence, the antisense strand sequence, or both the sense strand sequence and the antisense strand sequence comprise an overhang, e.g., an overhang at the 5′ end of the sense strand sequence and/or at the 3′ end of the antisense strand sequence, of 1 or 2 nucleotides;
(iii) the sense strand and the antisense strand comprise one mismatch; and/or
(iv) the antisense strand and the target sequence comprise one mismatch.

9. A modulatory polynucleotide comprising the siRNA of any one of claim 1 or 3-8.

10. The AAV viral genome of any one of claims 2-8, wherein the viral genome further encodes a modulatory polynucleotide comprising the sense and antisense strand of the siRNA.

11. The modulatory polynucleotide of claim 9 or the AAV viral genome of claim 10, wherein the modulatory polynucleotide further comprises one, two, three or all of:
(i) a 5′ flanking region;
(ii) a loop region; and
(iii) a 3′ flanking region.

12. The modulatory polynucleotide of claim 11 or the AAV viral genome of claim 11, wherein:
(A) (i) the 5′ flanking region comprises the nucleotide sequence of any one of SEQ ID NOs: 4878-4886; a nucleotide sequence at least 85%, 90%, 92%, 95%, 96%, 97%, 98%, or 99% identical thereto: a nucleotide sequence comprising one, two, three, four, five, six, or seven, but no more than ten different nucleotides relative to the nucleotide sequence of any of SEQ ID NOs: 4878-4886; or a nucleotide sequence comprising one, two, three, four, five, six, or seven, but no more than ten modifications relative to the nucleotide sequence of any of SEQ ID NOs: 4878-4886;
(ii) the loop region comprises the nucleotide sequence of any of SEQ ID NOs: 4887-4896; a nucleotide sequence at least 85%, 90%, 92%, 95%, 96%, 97%, 98%, or 99% identical thereto; a nucleotide sequence comprising one, two, three, or four, but no more than five different nucleotides relative to the nucleotide sequence of any of SEQ ID NOs: 4887-4896; or a nucleotide sequence comprising one, two, three, or four, but no more than five modifications relative to the nucleotide sequence of any of SEQ ID NOs: 4887-4896; and/or
(iii) the 3′ flanking region comprises the nucleotide sequence of any one of SEQ ID NOs: 4897-4904; a nucleotide sequence at least 85%, 90%, 92%, 95%, 96%, 97%, 98%, or 99% identical thereto; a nucleotide sequence comprising one, two, three, four, five, six, or seven, but no more than ten modifications relative to the nucleotide sequence of any of SEQ ID NOs: 4897-4904; or a nucleotide sequence comprising one, two, three, four, five, six, or seven, but no more than ten modifications relative to the nucleotide sequence of any of SEQ ID NOs: 4897-4904; and/or
(B) (i) the nucleotide sequence encoding the 5′ flanking region comprises the nucleotide sequence of any of SEQ ID NOs: 4353-4361, a nucleotide sequence at least 85%, 90%, 92%, 95%, 96%, 97%, 98%, or 99% identical thereto; a nucleotide sequence comprising one, two, three, four, five, six, or seven, but no more than ten different nucleotides relative to the nucleotide sequence of any of SEQ ID NOs: 4353-4361; or a nucleotide sequence comprising one, two, three, four, five, six, or seven, but no more than ten modifications relative to the nucleotide sequence of any of SEQ ID NOs: 4353-4361;
(ii) the nucleotide sequence encoding the loop region comprises the nucleotide sequence of any of SEQ ID NOs: 4362-4371; a nucleotide sequence at least 85%, 90%, 92%, 95%, 96%, 97%, 98%, or 99% identical thereto; a nucleotide sequence comprising one, two, three, or four, but no more than five different nucleotides relative to the nucleotide sequence of any of SEQ ID NOs: 4362-4371; or a nucleotide sequence comprising one, two, three, or four, but no more than five modifications relative to the nucleotide sequence of any of SEQ ID NOs: 4362-4371; and/or
(iii) the nucleotide sequence encoding the 3′ flanking region comprises the nucleotide sequence of any of SEQ ID NOs: 4372-4379; a nucleotide sequence at least 85%, 90%, 92%, 95%, 96%, 97%, 98%, or 99% identical thereto; a nucleotide sequence comprising one, two, three, four, five, six, or seven, but no more than ten different nucleotides relative to the nucleotide sequence of any of SEQ ID NOs:
4372-4379; or a nucleotide sequence comprising one, two, three, four, five, six, or seven, but no more than ten modifications relative to the nucleotide sequence of any of SEQ ID NOs: 4372-4379.

13. The modulatory polynucleotide of any one of claim 9, 11, or 12, or the AAV viral genome of any one of claims 10-12, wherein the modulatory polynucleotide comprises:
(A) (i) a 5′ flanking region comprising the nucleotide sequence of SEQ ID NO: 4879, a nucleotide sequence at least 85%, 90%, 92%, 95%, 96%, 97%, 98%, or 99% identical to SEQ ID NO: 4879, a nucleotide sequence comprising one, two, three, four, five, six, or seven, but no more than ten different nucleotides relative to the nucleotide sequence of SEQ ID NO: 4879; or a nucleotide sequence comprising one, two, three, four, five, six, or seven, but no more than ten different nucleotides relative to the nucleotide sequence of SEQ ID NO: 4879;
(ii) a loop region comprising the nucleotide sequence of SEQ ID NO: 4887, a nucleotide sequence at least 85%, 90%, 92%, 95%, 96%, 97%, 98%, or 99% identical to SEQ ID NO: 4887, a nucleotide sequence comprising one, two, three, or four, but no more than five different nucleotides relative to the nucleotide sequence of SEQ ID NO: 4887; or a nucleotide sequence comprising one, two, three, or four, but no more than five different nucleotides relative to the nucleotide sequence of SEQ ID NO: 4887; and
(iii) a 3′ flanking region of SEQ ID NO: 4898, a nucleotide sequence at least 85%, 90%, 92%, 95%, 96%, 97%, 98%, or 99% identical to SEQ ID NO: 4898, a nucleotide sequence comprising one, two, three, four, five, six, or seven, but no more than ten different nucleotides relative to the nucleotide sequence of SEQ ID NO: 4898, a nucleotide sequence comprising one, two, three, four, five, six, or seven, but no more than ten modifications relative to the nucleotide sequence of SEQ ID NO: 4898;
(B) (i) a 5′ flanking region comprising the nucleotide sequence of SEQ ID NO: 4879, a nucleotide sequence at least 85%, 90%, 92%, 95%, 96%, 97%, 98%, or 99% identical to SEQ ID NO: 4879, a nucleotide sequence comprising one, two, three, four, five, six, or seven, but no more than ten different nucleotides relative to the nucleotide sequence of SEQ ID NO: 4879; or a nucleotide sequence comprising one, two, three, four, five, six, or seven, but no more than ten modifications relative to the nucleotide sequence of SEQ ID NO: 4879;
(ii) a loop region comprising the nucleotide sequence of SEQ ID NO: 4888, a nucleotide sequence at least 85%, 90%, 92%, 95%, 96%, 97%, 98%, or 99% identical to SEQ ID NO: 4888, a nucleotide sequence comprising one, two, three, or four, but no more than five different nucleotides relative to the nucleotide sequence of SEQ ID NO: 4888; or a nucleotide sequence comprising one, two, three, or four, but no more than five modifications relative to the nucleotide sequence of SEQ ID NO: 4888; and
(iii) a 3′ flanking region of SEQ ID NO: 4898, a nucleotide sequence at least 85%, 90%, 92%, 95%, 96%, 97%, 98%, or 99% identical to SEQ ID NO: 4898, a nucleotide sequence comprising one, two, three, four, five, six, or seven, but no more than ten different nucleotides relative to the nucleotide sequence of SEQ ID NO: 4898, a nucleotide sequence comprising one, two, three, four, five, six, or seven, but no more than ten modifications relative to the nucleotide sequence of SEQ ID NO: 4898;
(C) (i) a 5′ flanking region comprising the nucleotide sequence of SEQ ID NO: 4879, a nucleotide sequence at least 85%, 90%, 92%, 95%, 96%, 97%, 98%, or 99% identical to SEQ ID NO: 4879, a nucleotide sequence comprising one, two, three, four, five, six, or seven, but no more than ten different nucleotides relative to the nucleotide sequence of SEQ ID NO: 4879; or a nucleotide sequence comprising one, two, three, four, five, six, or seven, but no more than ten modifications relative to the nucleotide sequence of SEQ ID NO: 4879;
(ii) a loop region comprising the nucleotide sequence of SEQ ID NO: 4887, a nucleotide sequence at least 85%, 90%, 92%, 95%, 96%, 97%, 98%, or 99% identical to SEQ ID NO: 4887, a nucleotide sequence comprising one, two, three, or four, but no more than five different nucleotides relative to the nucleotide sequence of SEQ ID NO: 4887; or a nucleotide sequence comprising one, two, three, or four, but no more than five modifications relative to the nucleotide sequence of SEQ ID NO: 4887; and
(iii) a 3′ flanking region of SEQ ID NO: 4899, a nucleotide sequence at least 85%, 90%, 92%, 95%, 96%, 97%, 98%, or 99% identical to SEQ ID NO: 4899, a nucleotide sequence comprising one, two, three, four, five, six, or seven, but no more than ten different nucleotides relative to the nucleotide sequence of SEQ ID NO: 4899, a nucleotide sequence comprising one, two, three, four, five, six, or seven, but no more than ten modifications relative to the nucleotide sequence of SEQ ID NO: 4899; or
(D) (i) a 5′ flanking region comprising the nucleotide sequence of SEQ ID NO: 4880, a nucleotide sequence at least 85%, 90%, 92%, 95%, 96%, 97%, 98%, or 99% identical to SEQ ID NO: 4880, a nucleotide sequence comprising one, two, three, four, five, six, or seven, but no more than ten different nucleotides relative to the nucleotide sequence of SEQ ID NO: 4880; or a nucleotide sequence comprising one, two, three, four, five, six, or seven, but no more than ten modifications relative to the nucleotide sequence of SEQ ID NO: 4880;
(ii) a loop region comprising the nucleotide sequence of SEQ ID NO: 4891, a nucleotide sequence at least 85%, 90%, 92%, 95%, 96%, 97%, 98%, or 99% identical to SEQ ID NO: 4891, a nucleotide sequence comprising one, two, three, or four, but no more than five different nucleotides relative to the nucleotide sequence of SEQ ID NO: 4891; or a nucleotide sequence comprising one, two, three, or four, but no more than five modifications relative to the nucleotide sequence of SEQ ID NO: 4891; and
(iii) a 3′ flanking region of SEQ ID NO: 4900, a nucleotide sequence at least 85%, 90%, 92%, 95%, 96%, 97%, 98%, or 99% identical to SEQ ID NO: 4900, a nucleotide sequence comprising one, two, three, four, five, six, or seven, but no more than ten different nucleotides relative to the nucleotide sequence of SEQ ID NO: 4900, or a nucleotide sequence comprising one, two, three, four, five, six, or seven, but no more than ten modifications relative to SEQ ID NO: 4900.

14. The modulatory polynucleotide of any one of claim 9 or 11-13 or the AAV viral genome of any one of claims 10-13, wherein the modulatory polynucleotide comprises in 5′ to 3′ order:
(i) the 5′ flanking region, sense strand sequence, loop region, antisense strand sequence, and 3′ flanking region; or
(ii) the 5′ flanking region, antisense strand sequence, loop region, sense strand sequence, and 3′ flanking region.

15. The modulatory polynucleotide of any one of claim 9 or 11-14 or the AAV viral genome of any one of claims 10-14, wherein the modulatory polynucleotide comprises in 5′ to 3′ order:
(A) (i) a 5′ flanking region comprising the nucleotide sequence of SEQ ID NO: 4880; a nucleotide sequence at least 85%, 90%, 95% 96%, 97%, 98%, 99% identical to SEQ ID NO: 4880; a nucleotide sequence comprising one, two, three, four, five, six, or seven, but no more than ten different nucleotides relative to the nucleotide sequence of SEQ ID NO: 4880; or a nucleotide sequence comprising one, two, three, four, five, six, or seven, but no more than ten modifications relative to the nucleotide sequence of SEQ ID NO: 4880;
(ii) the sense strand sequence of SEQ ID NO: 4906;
(iii) a loop region comprising the nucleotide sequence of SEQ ID NO: 4891; a nucleotide sequence at least 85%, 90%, 95% 96%, 97%, 98%, 99% identical to SEQ ID NO: 4891; a nucleotide sequence comprising one, two, three, or four, but no more than five different nucleotides relative to the nucleotide sequence of SEQ ID NO: 4891; or a nucleotide sequence comprising one, two, three, or four, but no more than five modifications relative to the nucleotide sequence of SEQ ID NO: 4891;
(iv) the antisense strand sequence of SEQ ID NO: 4908; and
(v) a 3′ flanking region comprising the nucleotide sequence of SEQ ID NO: 4900; a nucleotide sequence at least 85%, 90%, 95% 96%, 97%, 98%, 99% identical to SEQ ID NO: 4900; a nucleotide sequence comprising one, two, three, four, five, six, or seven, but no more than ten different nucleotides relative to the nucleotide sequence of SEQ ID NO: 4900; or a nucleotide sequence comprising one, two, three, four, five, six, or seven, but no more than ten modifications relative to SEQ ID NO: 4900;
(B) (i) a 5′ flanking region comprising the nucleotide sequence of SEQ ID NO: 4880; a nucleotide sequence at least 85%, 90%, 95% 96%, 97%, 98%, 99% identical to SEQ ID NO: 4880; a nucleotide sequence comprising one, two, three, four, five, six, or seven, but no more than ten different nucleotides relative to the nucleotide sequence of SEQ ID NO: 4880; or a nucleotide sequence comprising one, two, three, four, five, six, or seven, but no more than ten modifications relative to the nucleotide sequence of SEQ ID NO: 4880;
(ii) the sense strand sequence of SEQ ID NO: 4918;
(iii) a loop region comprising the nucleotide sequence of SEQ ID NO: 4891; a nucleotide sequence at least 85%, 90%, 95% 96%, 97%, 98%, 99% identical to SEQ ID NO: 4891; a nucleotide sequence comprising one, two, three, or four, but no more than five different nucleotides relative to the nucleotide sequence of SEQ ID NO: 4891; or a nucleotide sequence comprising one, two, three, or four, but no more than five modifications relative to the nucleotide sequence of SEQ ID NO: 4891;
(iv) the antisense strand sequence of SEQ ID NO: 4920; and
(v) a 3′ flanking region comprising the nucleotide sequence of SEQ ID NO: 4900; a nucleotide sequence at least 85%, 90%, 95% 96%, 97%, 98%, 99% identical to SEQ ID NO: 4900; a nucleotide sequence comprising one, two, three, four, five, six, or seven, but no more than ten different nucleotides relative to the nucleotide sequence of SEQ ID NO: 4900; or a nucleotide sequence comprising one, two, three, four, five, six, or seven, but no more than ten modifications relative to SEQ ID NO: 4900;
(C) (i) a 5′ flanking region comprising the nucleotide sequence of SEQ ID NO: 4880; a nucleotide sequence at least 85%, 90%, 95% 96%, 97%, 98%, 99% identical to SEQ ID NO: 4880; a nucleotide sequence comprising one, two, three, four, five, six, or seven, but no more than ten different nucleotides relative to the nucleotide sequence of SEQ ID NO: 4880; or a nucleotide sequence comprising one, two, three, four, five, six, or seven, but no more than ten modifications relative to the nucleotide sequence of SEQ ID NO: 4880;
(ii) the sense strand sequence of SEQ ID NO: 4922;
(iii) a loop region comprising the nucleotide sequence of SEQ ID NO: 4891; a nucleotide sequence at least 85%, 90%, 95% 96%, 97%, 98%, 99% identical to SEQ ID NO: 4891; a nucleotide sequence comprising one, two, three, or four, but no more than five different nucleotides relative to the nucleotide sequence of SEQ ID NO: 4891; or a nucleotide sequence comprising one, two, three, or four, but no more than five modifications relative to the nucleotide sequence of SEQ ID NO: 4891;
(iv) the antisense strand sequence of SEQ ID NO: 4924; and
(v) a 3′ flanking region comprising the nucleotide sequence of SEQ ID NO: 4900; a nucleotide sequence at least 85%, 90%, 95% 96%, 97%, 98%, 99% identical to SEQ ID NO: 4900; a nucleotide sequence comprising one, two, three, four, five, six, or seven, but no more than ten different nucleotides relative to the nucleotide sequence of SEQ ID NO: 4900; or a nucleotide sequence comprising one, two, three, four, five, six, or seven, but no more than ten modifications relative to SEQ ID NO: 4900;
(D) (i) a 5′ flanking region comprising the nucleotide sequence of SEQ ID NO: 4879, a nucleotide sequence at least 85%, 90%, 95% 96%, 97%, 98%, 99% identical to SEQ ID NO: 4879, a nucleotide sequence comprising one, two, three, four, five, six, or seven, but no more than ten different nucleotides relative to the nucleotide sequence of SEQ ID NO: 4879; or a nucleotide sequence comprising one, two, three, four, five, six, or seven, but no more than ten modifications relative to the nucleotide sequence of SEQ ID NO: 4879;
(ii) the sense strand sequence of SEQ ID NO: 4966;
(iii) a loop region comprising the nucleotide sequence of SEQ ID NO: 4888, a nucleotide sequence at least 85%, 90%, 95% 96%, 97%, 98%, 99% identical to SEQ ID NO: 4888, a nucleotide sequence comprising one, two, three, or four, but no more than five different nucleotides relative to the nucleotide sequence of SEQ ID NO: 4888; or a nucleotide sequence comprising one, two, three, or four, but no more than five modifications relative to the nucleotide sequence of SEQ ID NO: 4888;
(iv) the antisense strand sequence comprises the nucleotide sequence of SEQ ID NO: 4908; and
(v) a 3′ flanking region of SEQ ID NO: 4898, a nucleotide sequence at least 85%, 90%, 95% 96%, 97%, 98%, 99% identical to SEQ ID NO: 4898, a nucleotide sequence comprising one, two, three, four, five, six, or seven, but no more than ten different nucleotides relative to the nucleotide sequence of SEQ ID NO: 4898, a nucleotide sequence comprising one, two, three, four, five, six, or seven, but no more than ten modifications relative to the nucleotide sequence of SEQ ID NO: 4898;
(E) (i) a 5′ flanking region comprising the nucleotide sequence of SEQ ID NO: 4879, a nucleotide sequence at least 85%, 90%, 95% 96%, 97%, 98%, 99% identical to SEQ ID NO: 4879, a nucleotide sequence comprising one, two, three, four, five, six, or seven, but no more than ten different nucleotides relative to the nucleotide sequence of SEQ ID NO: 4879; or a nucleotide sequence comprising one, two, three, four, five, six, or seven, but no more than ten modifications relative to the nucleotide sequence of SEQ ID NO: 4879;
(ii) the sense strand sequence of SEQ ID NO: 4970;
(iii) a loop region comprising the nucleotide sequence of SEQ ID NO: 4888, a nucleotide sequence at least 85%, 90%, 95% 96%, 97%, 98%, 99% identical to SEQ ID NO: 4888, a nucleotide sequence comprising one, two, three, or four, but no more than five different nucleotides relative to the nucleotide sequence of SEQ ID NO: 4888; or a nucleotide sequence comprising one, two, three, or four, but no more than five modifications relative to the nucleotide sequence of SEQ ID NO: 4888;
(iv) the antisense strand sequence comprises the nucleotide sequence of SEQ ID NO: 4912; and
(v) a 3′ flanking region of SEQ ID NO: 4898, a nucleotide sequence at least 85%, 90%, 95% 96%, 97%, 98%, 99% identical to SEQ ID NO: 4898, a nucleotide sequence comprising one, two, three, four, five, six, or seven, but no more than ten different nucleotides relative to the nucleotide sequence of SEQ ID NO: 4898, a nucleotide sequence comprising one, two, three, four, five, six, or seven, but no more than ten modifications relative to the nucleotide sequence of SEQ ID NO: 4898;
(F) (i) a 5′ flanking region comprising the nucleotide sequence of SEQ ID NO: 4879, a nucleotide sequence at least 85%, 90%, 95% 96%, 97%, 98%, 99% identical to SEQ ID NO: 4879, a nucleotide sequence comprising one, two, three, four, five, six, or seven, but no more than ten different nucleotides relative to the nucleotide sequence of SEQ ID NO: 4879; or a nucleotide sequence comprising one, two, three, four, five, six, or seven, but no more than ten modifications relative to the nucleotide sequence of SEQ ID NO: 4879;
(ii) the sense strand sequence of SEQ ID NO: 4978;
(iii) a loop region comprising the nucleotide sequence of SEQ ID NO: 4888, a nucleotide sequence at least 85%, 90%, 95% 96%, 97%, 98%, 99% identical to SEQ ID NO: 4888, a nucleotide sequence comprising one, two, three, or four, but no more than five different nucleotides relative to the nucleotide sequence of SEQ ID NO: 4888; or a nucleotide sequence comprising one, two, three, or four, but no more than five modifications relative to the nucleotide sequence of SEQ ID NO: 4888;
(iv) the antisense strand sequence comprises the nucleotide sequence of SEQ ID NO: 4920; and
(v) a 3′ flanking region of SEQ ID NO: 4898, a nucleotide sequence at least 85%, 90%, 95% 96%, 97%, 98%, 99% identical to SEQ ID NO: 4898, a nucleotide sequence comprising one, two, three, four, five, six, or seven, but no more than ten different nucleotides relative to the nucleotide sequence of SEQ ID NO: 4898, a nucleotide sequence comprising one, two, three, four, five, six, or seven, but no more than ten modifications relative to the nucleotide sequence of SEQ ID NO: 4898; or
(G) (i) a 5′ flanking region comprising the nucleotide sequence of SEQ ID NO: 4879, a nucleotide sequence at least 85%, 90%, 95% 96%, 97%, 98%, 99% identical to SEQ ID NO: 4879, a nucleotide sequence comprising one, two, three, four, five, six, or seven, but no more than ten different nucleotides relative to the nucleotide sequence of SEQ ID NO: 4879; or a nucleotide sequence comprising one, two, three, four, five, six, or seven, but no more than ten modifications relative to the nucleotide sequence of SEQ ID NO: 4879;
(ii) the sense strand sequence of SEQ ID NO: 4982;
(iii) a loop region comprising the nucleotide sequence of SEQ ID NO: 4888, a nucleotide sequence at least 85%, 90%, 95% 96%, 97%, 98%, 99% identical to SEQ ID NO: 4888, a nucleotide sequence comprising one, two, three, or four, but no more than five different nucleotides relative to the nucleotide sequence of SEQ ID NO: 4888; or a nucleotide sequence comprising one, two, three, or four, but no more than five modifications relative to the nucleotide sequence of SEQ ID NO: 4888;
(iv) the antisense strand sequence comprises the nucleotide sequence of SEQ ID NO: 4924; and
(v) a 3′ flanking region of SEQ ID NO: 4898, a nucleotide sequence at least 85%, 90%, 95% 96%, 97%, 98%, 99% identical to SEQ ID NO: 4898, a nucleotide sequence comprising one, two, three, four, five, six, or seven, but no more than ten different nucleotides relative to the nucleotide sequence of SEQ ID NO: 4898, a nucleotide sequence comprising one, two, three, four, five, six, or seven, but no more than ten modifications relative to the nucleotide sequence of SEQ ID NO: 4898.

16. The modulatory polynucleotide of any one of claim 9 or 11-15 or the AAV viral genome of any one of claims 10-15, wherein the nucleotide sequence encoding the modulatory polynucleotide comprises in 5′ to 3′ order:
(A) (i) a 5′ flanking region comprising the nucleotide sequence of SEQ ID NO: 4355; a nucleotide sequence at least 85%, 90%, 95% 96%, 97%, 98%, 99% identical to SEQ ID NO: 4355; a nucleotide sequence comprising one, two, three, four, five, six, or seven, but no more than ten different nucleotides relative to the nucleotide sequence of SEQ ID NO: 4355; or a nucleotide sequence comprising one, two, three, four, five, six, or seven, but no more than ten modifications relative to the nucleotide sequence of SEQ ID NO: 4355;
(ii) the sense strand sequence of SEQ ID NO: 4905;
(iii) a loop region comprising the nucleotide sequence of SEQ ID NO: 4366; a nucleotide sequence at least 85%, 90%, 95% 96%, 97%, 98%, 99% identical to SEQ ID NO: 4366; a nucleotide sequence comprising one, two, three, or four, but no more than five different nucleotides relative to the nucleotide sequence of SEQ ID NO: 4366; or a nucleotide sequence comprising one, two, three, or four, but no more than five modifications relative to the nucleotide sequence of SEQ ID NO: 4366;
(iv) the antisense strand sequence of SEQ ID NO: 4907; and
(v) a 3′ flanking region comprising the nucleotide sequence of SEQ ID NO: 4375; a nucleotide sequence at least 85%, 90%, 95% 96%, 97%, 98%, 99% identical to SEQ ID NO: 4375; a nucleotide sequence comprising one, two, three, four, five, six, or seven, but no more than ten different nucleotides relative to the nucleotide sequence of SEQ ID NO: 4375; or a nucleotide sequence comprising one, two, three, four, five, six, or seven, but no more than ten modifications relative to SEQ ID NO: 4375;
(B) (i) a 5′ flanking region comprising the nucleotide sequence of SEQ ID NO: 4355; a nucleotide sequence at least 85%, 90%, 95% 96%, 97%, 98%, 99% identical to SEQ ID NO: 4355; a nucleotide sequence comprising one, two, three, four, five, six, or seven, but no more than ten different nucleotides relative to the nucleotide sequence of SEQ ID NO: 4355; or a nucleotide sequence comprising one, two, three, four, five, six, or seven, but no more than ten modifications relative to the nucleotide sequence of SEQ ID NO: 4355;
(ii) the sense strand sequence of SEQ ID NO: 4917;
(iii) a loop region comprising the nucleotide sequence of SEQ ID NO: 4366; a nucleotide sequence at least 85%, 90%, 95% 96%, 97%, 98%, 99% identical to SEQ ID NO: 4366; a nucleotide sequence comprising one, two, three, or four, but no more than five different nucleotides relative to the nucleotide sequence of SEQ ID NO: 4366; or a nucleotide sequence comprising one, two, three, or four, but no more than five modifications relative to the nucleotide sequence of SEQ ID NO: 4366;
(iv) the antisense strand sequence of SEQ ID NO: 4919; and
(v) a 3′ flanking region comprising the nucleotide sequence of SEQ ID NO: 4375; a nucleotide sequence at least 85%, 90%, 95% 96%, 97%, 98%, 99% identical to SEQ ID NO: 4375; a nucleotide sequence comprising one, two, three, four, five, six, or seven, but no more than ten different nucleotides relative to the nucleotide sequence of SEQ ID NO: 4375; or a nucleotide sequence comprising one, two, three, four, five, six, or seven, but no more than ten modifications relative to SEQ ID NO: 4375;
(C) (i) a 5′ flanking region comprising the nucleotide sequence of SEQ ID NO: 4355; a nucleotide sequence at least 85%, 90%, 95% 96%, 97%, 98%, 99% identical to SEQ ID NO: 4355; a nucleotide sequence comprising one, two, three, four, five, six, or seven, but no more than ten different nucleotides relative to the nucleotide sequence of SEQ ID NO: 4355; or a nucleotide sequence comprising one, two, three, four, five, six, or seven, but no more than ten modifications relative to the nucleotide sequence of SEQ ID NO: 4355;
(ii) the sense strand sequence of SEQ ID NO: 4921;
(iii) a loop region comprising the nucleotide sequence of SEQ ID NO: 4366; a nucleotide sequence at least 85%, 90%, 95% 96%, 97%, 98%, 99% identical to SEQ ID NO: 4366; a nucleotide sequence comprising one, two, three, or four, but no more than five different nucleotides relative to the nucleotide sequence of SEQ ID NO: 4366; or a nucleotide sequence comprising one, two, three, or four, but no more than five modifications relative to the nucleotide sequence of SEQ ID NO: 4366;
(iv) the antisense strand sequence of SEQ ID NO: 4923; and
(v) a 3′ flanking region comprising the nucleotide sequence of SEQ ID NO: 4375; a nucleotide sequence at least 85%, 90%, 95% 96%, 97%, 98%, 99% identical to SEQ ID NO: 4375; a nucleotide sequence comprising one, two, three, four, five, six, or seven, but no more than ten different nucleotides relative to the nucleotide sequence of SEQ ID NO: 4375; or a nucleotide sequence comprising one, two, three, four, five, six, or seven, but no more than ten modifications relative to SEQ ID NO: 4375;
(D) (i) a 5′ flanking region comprising the nucleotide sequence of SEQ ID NO: 4354, a nucleotide sequence at least 85%, 90%, 95% 96%, 97%, 98%, 99% identical to SEQ ID NO: 4354, a nucleotide sequence comprising one, two, three, four, five, six, or seven, but no more than ten different nucleotides relative to the nucleotide sequence of SEQ ID NO: 4354; or a nucleotide sequence comprising one, two, three, four, five, six, or seven, but no more than ten modifications relative to the nucleotide sequence of SEQ ID NO: 4354;
(ii) the sense strand sequence of SEQ ID NO: 4965;
(iii) a loop region comprising the nucleotide sequence of SEQ ID NO: 4363, a nucleotide sequence at least 85%, 90%, 95% 96%, 97%, 98%, 99% identical to SEQ ID NO: 4363, a nucleotide sequence comprising one, two, three, or four, but no more than five different nucleotides relative to the nucleotide sequence of SEQ ID NO: 4363; or a nucleotide sequence comprising one, two, three, or four, but no more than five modifications relative to the nucleotide sequence of SEQ ID NO: 4363;
(iv) the antisense strand sequence comprises the nucleotide sequence of SEQ ID NO: 4907; and
(v) a 3′ flanking region of SEQ ID NO: 4373, a nucleotide sequence at least 85%, 90%, 95% 96%, 97%, 98%, 99% identical to SEQ ID NO: 4373, a nucleotide sequence comprising one, two, three, four, five, six, or seven, but no more than ten different nucleotides relative to the nucleotide sequence of SEQ ID NO: 4373, a nucleotide sequence comprising one, two, three, four, five, six, or seven, but no more than ten modifications relative to the nucleotide sequence of SEQ ID NO: 4373;
(E) (i) a 5′ flanking region comprising the nucleotide sequence of SEQ ID NO: 4354, a nucleotide sequence at least 85%, 90%, 95% 96%, 97%, 98%, 99% identical to SEQ ID NO: 4354, a nucleotide sequence comprising one, two, three, four, five, six, or seven, but no more than ten different nucleotides relative to the nucleotide sequence of SEQ ID NO: 4354; or a nucleotide sequence comprising one, two, three, four, five, six, or seven, but no more than ten modifications relative to the nucleotide sequence of SEQ ID NO: 4354;
(ii) the sense strand sequence of SEQ ID NO: 4969;
(iii) a loop region comprising the nucleotide sequence of SEQ ID NO: 4363, a nucleotide sequence at least 85%, 90%, 95% 96%, 97%, 98%, 99% identical to SEQ ID NO: 4363, a nucleotide sequence comprising one, two, three, or four, but no more than five different nucleotides relative to the nucleotide sequence of SEQ ID NO: 4363; or a nucleotide sequence comprising one, two, three, or four, but no more than five modifications relative to the nucleotide sequence of SEQ ID NO: 4363;
(iv) the antisense strand sequence comprises the nucleotide sequence of SEQ ID NO: 4911; and
(v) a 3′ flanking region of SEQ ID NO: 4373, a nucleotide sequence at least 85%, 90%, 95% 96%, 97%, 98%, 99% identical to SEQ ID NO: 4373, a nucleotide sequence comprising one, two, three, four, five, six, or seven, but no more than ten different nucleotides relative to the nucleotide sequence of SEQ ID NO: 4373, a nucleotide sequence comprising one, two, three, four, five, six, or seven, but no more than ten modifications relative to the nucleotide sequence of SEQ ID NO: 4373;
(F) (i) a 5′ flanking region comprising the nucleotide sequence of SEQ ID NO: 4354, a nucleotide sequence at least 85%, 90%, 95% 96%, 97%, 98%, 99% identical to SEQ ID NO: 4354, a nucleotide sequence comprising one, two, three, four, five, six, or seven, but no more than ten different nucleotides relative to the nucleotide sequence of SEQ ID NO: 4354; or a nucleotide sequence comprising one, two, three, four, five, six, or seven, but no more than ten modifications relative to the nucleotide sequence of SEQ ID NO: 4354;
(ii) the sense strand sequence of SEQ ID NO: 4977;
(iii) a loop region comprising the nucleotide sequence of SEQ ID NO: 4363, a nucleotide sequence at least 85%, 90%, 95% 96%, 97%, 98%, 99% identical to SEQ ID NO: 4363, a nucleotide sequence comprising one, two, three, or four, but no more than five different nucleotides relative to the nucleotide sequence of SEQ ID NO: 4363; or a nucleotide sequence comprising one, two, three, or four, but no more than five modifications relative to the nucleotide sequence of SEQ ID NO: 4363;
(iv) the antisense strand sequence comprises the nucleotide sequence of SEQ ID NO: 4919; and
(v) a 3′ flanking region of SEQ ID NO: 4373, a nucleotide sequence at least 85%, 90%, 95% 96%, 97%, 98%, 99% identical to SEQ ID NO: 4373, a nucleotide sequence comprising one, two, three, four, five, six, or seven, but no more than ten different nucleotides relative to the nucleotide sequence of SEQ ID NO: 4373, a nucleotide sequence comprising one, two, three, four, five, six, or seven, but no more than ten modifications relative to the nucleotide sequence of SEQ ID NO: 4373; or
(G) (i) a 5′ flanking region comprising the nucleotide sequence of SEQ ID NO: 4354, a nucleotide sequence at least 85%, 90%, 95% 96%, 97%, 98%, 99% identical to SEQ ID NO: 4354, a nucleotide sequence comprising one, two, three, four, five, six, or seven, but no more than ten different nucleotides relative to the nucleotide sequence of SEQ ID NO: 4354; or a nucleotide sequence comprising one, two, three, four, five, six, or seven, but no more than ten modifications relative to the nucleotide sequence of SEQ ID NO: 4354;
(ii) the sense strand sequence of SEQ ID NO: 4981;
(iii) a loop region comprising the nucleotide sequence of SEQ ID NO: 4363, a nucleotide sequence at least 85%, 90%, 95% 96%, 97%, 98%, 99% identical to SEQ ID NO: 4363, a nucleotide sequence comprising one, two, three, or four, but no more than five different nucleotides relative to the nucleotide sequence of SEQ ID NO: 4363; or a nucleotide sequence comprising one, two, three, or four, but no more than five modifications relative to the nucleotide sequence of SEQ ID NO: 4363;
(iv) the antisense strand sequence comprises the nucleotide sequence of SEQ ID NO: 4923; and
(v) a 3′ flanking region of SEQ ID NO: 4373, a nucleotide sequence at least 85%, 90%, 95% 96%, 97%, 98%, 99% identical to SEQ ID NO: 4373, a nucleotide sequence comprising one, two, three, four, five, six, or seven, but no more than ten different nucleotides relative to the nucleotide sequence of SEQ ID NO: 4373, a nucleotide sequence comprising one, two, three, four, five, six, or seven, but no more than ten modifications relative to the nucleotide sequence of SEQ ID NO: 4373.

17. The modulatory polynucleotide of any one of claim 9 or 11-16, or the AAV viral genome of any one of claims 10-16, wherein the nucleotide sequence encoding the modulatory polynucleotide comprises the nucleotide sequence of any one of SEQ ID NOs: 4405, 4408, 4409, 4390, 4391, 4393, 4394, 4380-4389, 4392, 4395-4404, 4406, or 4407, or nucleotide sequence at least 85%, 90%, 92%, 95%, 96%, 97%, 98%, or 99% identical thereto.

18. An AAV viral genome comprising a promoter operably linked to a nucleic acid encoding the modulatory polynucleotide of any one of claim 9 or 11-17 or the siRNA of any one of claim 1 or 3-8.

19. The AAV viral genome of any one of claim 3-8 or 10-17, wherein the AAV viral genome further comprises a promoter operably linked to the nucleotide sequence encoding the sense strand sequence and the antisense strand sequence or the nucleotide sequence encoding the modulatory polynucleotide.

20. The AAV viral genome of claim 18 or 19, wherein the promoter:
(i) is a ubiquitous promoter;
(ii) is a cell or tissue specific promoter;
(iii) is chosen from human elongation factor 1α-subunit (EF1α), cytomegalovirus (CMV) immediate-early enhancer and/or promoter, chicken β-actin (CBA) and its derivative CAG, β glucuronidase (GUSB), or ubiquitin C (UBC), neuron-specific enolase (NSE), platelet-derived growth factor (PDGF), platelet-derived growth factor B-chain (PDGF-β), intercellular adhesion molecule 2 (ICAM-2), synapsin (Syn), methyl-CpG binding protein 2 (MeCP2), Ca2+/calmodulin-dependent protein kinase II (CaMKII), metabotropic glutamate receptor 2 (mGluR2), neurofilament light chain (NFL) or neurofilament heavy chain (NFH), β-globin minigene nβ2, preproenkephalin (PPE), enkephalin (Enk) and excitatory amino acid transporter 2 (EAAT2), glial fibrillary acidic protein (GFAP), myelin basic protein (MBP), a cardiovascular promoter (e.g., αMHC, cTnT, and CMV-MLC2k), a liver promoter (e.g., hAAT, TBG), a skeletal muscle promoter (e.g., desmin, MCK, C512) or a functional fragment, e.g., a truncation, or a functional variant thereof;
(iii) is a CBA promoter or variant thereof;
(iv) comprises the nucleotide sequence of any one of the nucleotide sequences provided in Table 2; a nucleotide sequence comprising at least one, two, three, four, five, six, or seven but no more than ten modifications, e.g., substitutions, insertions, or deletions, relative to any one of the nucleotide sequences provided in Table 2; or a nucleotide sequence with at least 85%, 90%, 92%, 95%, 96%, 97%, 98%, or 99% sequence identity to any one of the nucleotide sequences provided in Table 2; or
(v) comprises the nucleotide sequence of SEQ ID NO: 5199; a nucleotide sequence comprising at least one, two, three, four, five, six, or seven but no more than ten modifications, e.g., substitutions, insertions, or deletions, relative to SEQ ID NO: 5199; or a nucleotide sequence with at least 85%, 90%, 92%, 95%, 96%, 97%, 98%, or 99% sequence identity to SEQ ID NO: 5199.

21. The AAV viral genome of any one of claim 2-8 or 10-20, wherein the AAV viral genome further comprises:
(i) at least one or two inverted terminal repeat (ITR) sequences, optionally wherein the AAV viral genome comprises an ITR sequence positioned 5′ relative to the nucleic acid encoding the modulatory polynucleotide or siRNA and/or an ITR sequence positioned 3′ relative to the nucleic acid encoding the modulatory polynucleotide or siRNA;
(ii) a polyadenylation (polyA) signal sequence;
(iii) an enhancer, a Kozak sequence, an intron region, and/or an exon region; and/or
(iv) a nucleotide sequence encoding a microRNA (miR) binding site, e.g., a miR binding site that modulates, e.g., reduces expression of payload encoded by the viral genome in a cell or tissue where the corresponding miRNA is expressed; optionally wherein the encoded miR binding site modulates, e.g., reduces expression of the encoded payload in a cell or tissue of the DRG, liver, heart, hematopoietic lineage, or a combination thereof.

22. The AAV viral genome of claim 21, wherein:
(i) the ITR positioned 5′ relative to the nucleic acid encoding the modulator polynucleotide or siRNA comprises the nucleotide sequence of SEQ ID NO: 5197 or 4469; a nucleotide sequence comprising at least one, two, three, four, five, six, or seven but no more than ten modifications, e.g., substitutions, insertions, or deletions, relative to SEQ ID NO: 5197 or 4469; or a nucleotide sequence with at least 80%, 85%, 90%, 95%, 96%, 97%, 98%, or 99% sequence identity to SEQ ID NO: 5197 or 4469;
(ii) the ITR positioned 3′ relative to the nucleic acid encoding the modulator polynucleotide or siRNA comprises the nucleotide sequence of SEQ ID NO: 5200 or 4470; a nucleotide sequence comprising at least one, two, three, four, five, six, or seven but no more than ten modifications, e.g., substitutions, insertions, or deletions, relative to SEQ ID NO: 5200 or 4470; or a nucleotide sequence with at least 80%, 85%, 90%, 95%, 96%, 97%, 98%, or 99% sequence identity to SEQ ID NO: 5200 or 4470;
(iii) the polyA signal sequence comprises the nucleotide sequence of SEQ ID NO: 4476; a nucleotide sequence comprising at least one, two, three, four, five, six, or seven but no more than ten modifications, e.g., substitutions, insertions, or deletions, relative to SEQ ID NO: 4476; or a nucleotide sequence with at least 80% (e.g., 85%, 90%, 95%, 96%, 97%, 98%, or 99%) sequence identity to SEQ ID NO: 4476;
(iv) the enhancer comprises a CMVie enhancer or variant thereof;
(v) the enhancer comprises the nucleotide sequence of SEQ ID NO: 4471 or 4472; a nucleotide sequence comprising at least one, two, three, four, five, six, or seven but no more than ten modifications, e.g., substitutions, insertions, or deletions, relative to SEQ ID NO: 4471 or 4472; or a nucleotide sequence with at least 80%, 85%, 90%, 95%, 96%, 97%, 98%, or 99% sequence identity to SEQ ID NO: 4471 or 4472; and/or
(vi) the intron comprises the nucleotide sequence of SEQ ID NO: 4475; a nucleotide sequence comprising at least one, two, three, four, five, six, or seven but no more than ten modifications, e.g., substitutions, insertions, or deletions, relative to SEQ ID NO: 4475; or a nucleotide sequence with at least 80%, 85%, 90%, 95%, 96%, 97%, 98%, or 99% sequence identity to SEQ ID NO: 4475.

23. The AAV viral genome of any one of claim 2-8 or 10-22, wherein the AAV viral genome is self-complementary or single stranded.

24. The AAV viral genome of any one of claim 2-8 or 10-23, wherein the AAV viral genome further comprises a nucleotide sequence encoding a Rep protein, e.g., a non-structural protein, wherein the Rep protein comprises a Rep78 protein, a Rep68, Rep52 protein, and/or a Rep40 protein (e.g., a Rep78 and a Rep52 protein).

25. The AAV viral genome of any one of claim 2-8 or 10-24, which comprises in 5′ to 3′ order:
(A) (i) an ITR, wherein the ITR comprises the nucleotide sequence of SEQ ID NO: 5197; a nucleotide sequence at least 80%, 85%, 90%, 92%, 95%, 96%, 97%, 98%, or 99% identical to SEQ ID NO: 5197; or a nucleotide sequence comprising at least one, two, three, four, five, six, or seven but no more than ten modifications, e.g., substitutions, insertions, or deletions, relative to SEQ ID NO: 5197;
(ii) an enhancer, wherein the enhancer comprises the nucleotide sequence of SEQ ID NO: 4471; a nucleotide sequence comprising at least one, two, three, four, five, six, or seven but no more than ten modifications, e.g., substitutions, insertions, or deletions, relative to SEQ ID NO: 4471; or a nucleotide sequence at least 80%, 85%, 90%, 92%, 95%, 96%, 97%, 98%, or 99% identical to SEQ ID NO: 4471;
(iii) a promoter, wherein the promoter comprises the nucleotide sequence of SEQ ID NO: 5199; a nucleotide sequence comprising at least one, two, three, four, five, six, or seven but no more than ten modifications, e.g., substitutions, insertions, or deletions, relative to SEQ ID NO: 5199; or a nucleotide sequence at least 80%, 85%, 90%, 92%, 95%, 96%, 97%, 98%, or 99% identical to SEQ ID NO: 5199;
(iv) an intron, wherein the intro comprises the nucleotide sequence of SEQ ID NO: 4475; a nucleotide sequence comprising at least one, two, three, four, five, six, or seven but no more than ten modifications, e.g., substitutions, insertions, or deletions, relative to SEQ ID NO: 4475; or a nucleotide sequence at least 80%, 80%, 85%, 90%, 92%, 95%, 96%, 97%, 98%, or 99% identical to SEQ ID NO: 4475;
(v) a nucleotide sequence encoding a modulatory polynucleotide, wherein the nucleotide sequence comprises any one of SEQ ID NOs: 4380-4409 or 5027-5050, or nucleotide sequence at least 80%, 85%, 90%, 92%, 95%, 96%, 97%, 98%, or 99% identical thereto;
(vi) a polyA signal sequence, wherein the polyA signal sequence comprises the nucleotide sequence of SEQ ID NO: 4476; a nucleotide sequence comprising at least one, two, three, four, five, six, or seven but no more than ten modifications, e.g., substitutions, insertions, or deletions, relative to SEQ ID NO: 4476; or a nucleotide sequence at least 80%, 85%, 90%, 92%, 95%, 96%, 97%, 98%, or 99% identical to SEQ ID NO:
4476; and
(vii) an ITR, wherein the ITR comprises the nucleotide sequence of SEQ ID NO: 5200; a nucleotide sequence at least 80%, 85%, 90%, 92%, 95%, 96%, 97%, 98%, or 99% identical to SEQ ID NO: 5200; or a nucleotide sequence comprising at least one, two, three, four, five, six, or seven but no more than ten modifications, e.g., substitutions, insertions, or deletions, relative to SEQ ID NO: 5200; or
(B) (i) an ITR, wherein the ITR comprises the nucleotide sequence of SEQ ID NO: 4469; a nucleotide sequence at least 80%, 85%, 90%, 92%, 95%, 96%, 97%, 98%, or 99% identical to SEQ ID NO: 4469; or a nucleotide sequence comprising at least one, two, three, four, five, six, or seven but no more than ten modifications, e.g., substitutions, insertions, or deletions, relative to SEQ ID NO: 4469;
(ii) an enhancer, wherein the enhancer comprises the nucleotide sequence of SEQ ID NO: 4472; a nucleotide sequence comprising at least one, two, three, four, five, six, or seven but no more than ten modifications, e.g., substitutions, insertions, or deletions, relative to SEQ ID NO: 4472; or a nucleotide sequence at least 80%, 85%, 90%, 92%, 95%, 96%, 97%, 98%, or 99% identical to SEQ ID NO: 4472;
(iii) a promoter, wherein the promoter comprises the nucleotide sequence of SEQ ID NO: 5199; a nucleotide sequence comprising at least one, two, three, four, five, six, or seven but no more than ten modifications, e.g., substitutions, insertions, or deletions, relative to SEQ ID NO: 5199; or a nucleotide sequence at least 80%, 85%, 90%, 92%, 95%, 96%, 97%, 98%, or 99% identical to SEQ ID NO: 5199;
(iv) an intron, wherein the intro comprises the nucleotide sequence of SEQ ID NO: 4475; a nucleotide sequence comprising at least one, two, three, four, five, six, or seven but no more than ten modifications, e.g., substitutions, insertions, or deletions, relative to SEQ ID NO: 4475; or a nucleotide sequence at least 80%, 80%, 85%, 90%, 92%, 95%, 96%, 97%, 98%, or 99% identical to SEQ ID NO: 4475;
(v) a nucleotide sequence encoding a modulatory polynucleotide, wherein the nucleotide sequence comprises any one of SEQ ID NOs: 4380-4409 or 5027-5050, or nucleotide sequence at least 80%, 85%, 90%, 92%, 95%, 96%, 97%, 98%, or 99% identical thereto;
(vi) a polyA signal sequence, wherein the polyA signal sequence comprises the nucleotide sequence of SEQ ID NO: 4476; a nucleotide sequence comprising at least one, two, three, four, five, six, or seven but no more than ten modifications, e.g., substitutions, insertions, or deletions, relative to SEQ ID NO: 4476; or a nucleotide sequence at least 80%, 85%, 90%, 92%, 95%, 96%, 97%, 98%, or 99% identical to SEQ ID NO: 4476; and
(vii) an ITR, wherein the ITR comprises the nucleotide sequence of SEQ ID NO: 4470; a nucleotide sequence at least 80%, 85%, 90%, 92%, 95%, 96%, 97%, 98%, or 99% identical to SEQ ID NO: 4470; or a nucleotide sequence comprising at least one, two, three, four, five, six, or seven but no more than ten modifications, e.g., substitutions, insertions, or deletions, relative to SEQ ID NO: 4470.

26. The AAV viral genome of any one of claim 2-8 or 10-25, which comprises in 5′ to 3′ order:
(A) (i) an ITR, wherein the ITR comprises the nucleotide sequence of SEQ ID NO: 5197; a nucleotide sequence at least 80%, 85%, 90%, 92%, 95%, 96%, 97%, 98%, or 99% identical to SEQ ID NO: 5197; or a nucleotide sequence comprising at least one, two, three, four, five, six, or seven but no more than ten modifications, e.g., substitutions, insertions, or deletions, relative to SEQ ID NO: 5197;
(ii) an enhancer, wherein the enhancer comprises the nucleotide sequence of SEQ ID NO: 4471; a nucleotide sequence comprising at least one, two, three, four, five, six, or seven but no more than ten modifications, e.g., substitutions, insertions, or deletions, relative to SEQ ID NO: 4471; or a nucleotide sequence at least 80%, 85%, 90%, 92%, 95%, 96%, 97%, 98%, or 99% identical to SEQ ID NO: 4471;
(iii) a promoter, wherein the promoter comprises the nucleotide sequence of SEQ ID NO: 5199; a nucleotide sequence comprising at least one, two, three, four, five, six, or seven but no more than ten modifications, e.g., substitutions, insertions, or deletions, relative to SEQ ID NO: 5199; or a nucleotide sequence at least 80%, 85%, 90%, 92%, 95%, 96%, 97%, 98%, or 99% identical to SEQ ID NO: 5199;
(iv) an intron, wherein the intro comprises the nucleotide sequence of SEQ ID NO: 4475; a nucleotide sequence comprising at least one, two, three, four, five, six, or seven but no more than ten modifications, e.g., substitutions, insertions, or deletions, relative to SEQ ID NO: 4475; or a nucleotide sequence at least 80%, 80%, 85%, 90%, 92%, 95%, 96%, 97%, 98%, or 99% identical to SEQ ID NO: 4475;
(v) a nucleotide sequence encoding a modulatory polynucleotide, wherein the nucleotide sequence comprises SEQ ID NO: 4405, or nucleotide sequence at least 80%, 85%, 90%, 92%, 95%, 96%, 97%, 98%, or 99% identical thereto;
(vi) a polyA signal sequence, wherein the polyA signal sequence comprises the nucleotide sequence of SEQ ID NO: 4476; a nucleotide sequence comprising at least one, two, three, four, five, six, or seven but no more than ten modifications, e.g., substitutions, insertions, or deletions, relative to SEQ ID NO: 4476; or a nucleotide sequence at least 80%, 85%, 90%, 92%, 95%, 96%, 97%, 98%, or 99% identical to SEQ ID NO: 4476; and
(vii) an ITR, wherein the ITR comprises the nucleotide sequence of SEQ ID NO: 5200; a nucleotide sequence at least 80%, 85%, 90%, 92%, 95%, 96%, 97%, 98%, or 99% identical to SEQ ID NO: 5200; or a nucleotide sequence comprising at least one, two, three, four, five, six, or seven but no more than ten modifications, e.g., substitutions, insertions, or deletions, relative to SEQ ID NO: 5200;
(B) (i) an ITR, wherein the ITR comprises the nucleotide sequence of SEQ ID NO: 5197; a nucleotide sequence at least 80%, 85%, 90%, 92%, 95%, 96%, 97%, 98%, or 99% identical to SEQ ID NO: 5197; or a nucleotide sequence comprising at least one, two, three, four, five, six, or seven but no more than ten modifications, e.g., substitutions, insertions, or deletions, relative to SEQ ID NO: 5197;
(ii) an enhancer, wherein the enhancer comprises the nucleotide sequence of SEQ ID NO: 4471; a nucleotide sequence comprising at least one, two, three, four, five, six, or seven but no more than ten modifications, e.g., substitutions, insertions, or deletions, relative to SEQ ID NO: 4471; or a nucleotide sequence at least 80%, 85%, 90%, 92%, 95%, 96%, 97%, 98%, or 99% identical to SEQ ID NO: 4471;
(iii) a promoter, wherein the promoter comprises the nucleotide sequence of SEQ ID NO: 5199; a nucleotide sequence comprising at least one, two, three, four, five, six, or seven but no more than ten modifications, e.g., substitutions, insertions, or deletions, relative to SEQ ID NO: 5199; or a nucleotide sequence at least 80%, 85%, 90%, 92%, 95%, 96%, 97%, 98%, or 99% identical to SEQ ID NO: 5199;
(iv) an intron, wherein the intro comprises the nucleotide sequence of SEQ ID NO: 4475; a nucleotide sequence comprising at least one, two, three, four, five, six, or seven but no more than ten modifications, e.g., substitutions, insertions, or deletions, relative to SEQ ID NO: 4475; or a nucleotide sequence at least 80%, 80%, 85%, 90%, 92%, 95%, 96%, 97%, 98%, or 99% identical to SEQ ID NO: 4475;
(v) a nucleotide sequence encoding a modulatory polynucleotide, wherein the nucleotide sequence comprises SEQ ID NO: 4408, or nucleotide sequence at least 80%, 85%, 90%, 92%, 95%, 96%, 97%, 98%, or 99% identical thereto;
(vi) a polyA signal sequence, wherein the polyA signal sequence comprises the nucleotide sequence of SEQ ID NO: 4476; a nucleotide sequence comprising at least one, two, three, four, five, six, or seven but no more than ten modifications, e.g., substitutions, insertions, or deletions, relative to SEQ ID NO: 4476; or a nucleotide sequence at least 80%, 85%, 90%, 92%, 95%, 96%, 97%, 98%, or 99% identical to SEQ ID NO: 4476; and
(vii) an ITR, wherein the ITR comprises the nucleotide sequence of SEQ ID NO: 5200; a nucleotide sequence at least 80%, 85%, 90%, 92%, 95%, 96%, 97%, 98%, or 99% identical to SEQ ID NO: 5200; or a nucleotide sequence comprising at least one, two, three, four, five, six, or seven but no more than ten modifications, e.g., substitutions, insertions, or deletions, relative to SEQ ID NO: 5200;
(C) (i) an ITR, wherein the ITR comprises the nucleotide sequence of SEQ ID NO: 5197; a nucleotide sequence at least 80%, 85%, 90%, 92%, 95%, 96%, 97%, 98%, or 99% identical to SEQ ID NO: 5197; or a nucleotide sequence comprising at least one, two, three, four, five, six, or seven but no more than ten modifications, e.g., substitutions, insertions, or deletions, relative to SEQ ID NO: 5197;
(ii) an enhancer, wherein the enhancer comprises the nucleotide sequence of SEQ ID NO: 4471; a nucleotide sequence comprising at least one, two, three, four, five, six, or seven but no more than ten modifications, e.g., substitutions, insertions, or deletions, relative to SEQ ID NO: 4471; or a nucleotide sequence at least 80%, 85%, 90%, 92%, 95%, 96%, 97%, 98%, or 99% identical to SEQ ID NO: 4471;
(iii) a promoter, wherein the promoter comprises the nucleotide sequence of SEQ ID NO: 5199; a nucleotide sequence comprising at least one, two, three, four, five, six, or seven but no more than ten modifications, e.g., substitutions, insertions, or deletions, relative to SEQ ID NO: 5199; or a nucleotide sequence at least 80%, 85%, 90%, 92%, 95%, 96%, 97%, 98%, or 99% identical to SEQ ID NO: 5199;
(iv) an intron, wherein the intro comprises the nucleotide sequence of SEQ ID NO: 4475; a nucleotide sequence comprising at least one, two, three, four, five, six, or seven but no more than ten modifications, e.g., substitutions, insertions, or deletions, relative to SEQ ID NO: 4475; or a nucleotide sequence at least 80%, 80%, 85%, 90%, 92%, 95%, 96%, 97%, 98%, or 99% identical to SEQ ID NO: 4475;
(v) a nucleotide sequence encoding a modulatory polynucleotide, wherein the nucleotide sequence comprises SEQ ID NO: 4409, or nucleotide sequence at least 80%, 85%, 90%, 92%, 95%, 96%, 97%, 98%, or 99% identical thereto;
(vi) a polyA signal sequence, wherein the polyA signal sequence comprises the nucleotide sequence of SEQ ID NO: 4476; a nucleotide sequence comprising at least one, two, three, four, five, six, or seven but no more than ten modifications, e.g., substitutions, insertions, or deletions, relative to SEQ ID NO: 4476; or a nucleotide sequence at least 80%, 85%, 90%, 92%, 95%, 96%, 97%, 98%, or 99% identical to SEQ ID NO: 4476; and
(vii) an ITR, wherein the ITR comprises the nucleotide sequence of SEQ ID NO: 5200; a nucleotide sequence at least 80%, 85%, 90%, 92%, 95%, 96%, 97%, 98%, or 99% identical to SEQ ID NO: 5200; or a nucleotide sequence comprising at least one, two, three, four, five, six, or seven but no more than ten modifications, e.g., substitutions, insertions, or deletions, relative to SEQ ID NO: 5200;
(D) (i) an ITR, wherein the ITR comprises the nucleotide sequence of SEQ ID NO: 5197; a nucleotide sequence at least 80%, 85%, 90%, 92%, 95%, 96%, 97%, 98%, or 99% identical to SEQ ID NO: 5197; or a nucleotide sequence comprising at least one, two, three, four, five, six, or seven but no more than ten modifications, e.g., substitutions, insertions, or deletions, relative to SEQ ID NO: 5197;
(ii) an enhancer, wherein the enhancer comprises the nucleotide sequence of SEQ ID NO: 4471; a nucleotide sequence comprising at least one, two, three, four, five, six, or seven but no more than ten modifications, e.g., substitutions, insertions, or deletions, relative to SEQ ID NO: 4471; or a nucleotide sequence at least 80%, 85%, 90%, 92%, 95%, 96%, 97%, 98%, or 99% identical to SEQ ID NO: 4471;
(iii) a promoter, wherein the promoter comprises the nucleotide sequence of SEQ ID NO: 5199; a nucleotide sequence comprising at least one, two, three, four, five, six, or seven but no more than ten modifications, e.g., substitutions, insertions, or deletions, relative to SEQ ID NO: 5199; or a nucleotide sequence at least 80%, 85%, 90%, 92%, 95%, 96%, 97%, 98%, or 99% identical to SEQ ID NO: 5199;
(iv) an intron, wherein the intro comprises the nucleotide sequence of SEQ ID NO: 4475; a nucleotide sequence comprising at least one, two, three, four, five, six, or seven but no more than ten modifications, e.g., substitutions, insertions, or deletions, relative to SEQ ID NO: 4475; or a nucleotide sequence at least 80%, 80%, 85%, 90%, 92%, 95%, 96%, 97%, 98%, or 99% identical to SEQ ID NO: 4475;
(v) a nucleotide sequence encoding a modulatory polynucleotide, wherein the nucleotide sequence comprises SEQ ID NO: 4390, or nucleotide sequence at least 80%, 85%, 90%, 92%, 95%, 96%, 97%, 98%, or 99% identical thereto;
(vi) a polyA signal sequence, wherein the poly A signal sequence comprises the nucleotide sequence of SEQ ID NO: 4476; a nucleotide sequence comprising at least one, two, three, four, five, six, or seven but no more than ten modifications, e.g., substitutions, insertions, or deletions, relative to SEQ ID NO: 4476; or a nucleotide sequence at least 80%, 85%, 90%, 92%, 95%, 96%, 97%, 98%, or 99% identical to SEQ ID NO: 4476; and
(vii) an ITR, wherein the ITR comprises the nucleotide sequence of SEQ ID NO: 5200; a nucleotide sequence at least 80%, 85%, 90%, 92%, 95%, 96%, 97%, 98%, or 99% identical to SEQ ID NO: 5200; or a nucleotide sequence comprising at least one, two, three, four, five, six, or seven but no more than ten modifications, e.g., substitutions, insertions, or deletions, relative to SEQ ID NO: 5200;
(E) (i) an ITR, wherein the ITR comprises the nucleotide sequence of SEQ ID NO: 5197; a nucleotide sequence at least 80%, 85%, 90%, 92%, 95%, 96%, 97%, 98%, or 99% identical to SEQ ID NO: 5197; or a nucleotide sequence comprising at least one, two, three, four, five, six, or seven but no more than ten modifications, e.g., substitutions, insertions, or deletions, relative to SEQ ID NO: 5197;
(ii) an enhancer, wherein the enhancer comprises the nucleotide sequence of SEQ ID NO: 4471; a nucleotide sequence comprising at least one, two, three, four, five, six, or seven but no more than ten modifications, e.g., substitutions, insertions, or deletions, relative to SEQ ID NO: 4471; or a nucleotide sequence at least 80%, 85%, 90%, 92%, 95%, 96%, 97%, 98%, or 99% identical to SEQ ID NO: 4471;
(iii) a promoter, wherein the promoter comprises the nucleotide sequence of SEQ ID NO: 5199; a nucleotide sequence comprising at least one, two, three, four, five, six, or seven but no more than ten modifications, e.g., substitutions, insertions, or deletions, relative to SEQ ID NO: 5199; or a nucleotide sequence at least 80%, 85%, 90%, 92%, 95%, 96%, 97%, 98%, or 99% identical to SEQ ID NO: 5199;
(iv) an intron, wherein the intro comprises the nucleotide sequence of SEQ ID NO: 4475; a nucleotide sequence comprising at least one, two, three, four, five, six, or seven but no more than ten modifications, e.g., substitutions, insertions, or deletions, relative to SEQ ID NO: 4475; or a nucleotide sequence at least 80%, 80%, 85%, 90%, 92%, 95%, 96%, 97%, 98%, or 99% identical to SEQ ID NO: 4475;
(v) a nucleotide sequence encoding a modulatory polynucleotide, wherein the nucleotide sequence comprises SEQ ID NO: 4391, or nucleotide sequence at least 80%, 85%, 90%, 92%, 95%, 96%, 97%, 98%, or 99% identical thereto;
(vi) a polyA signal sequence, wherein the polyA signal sequence comprises the nucleotide sequence of SEQ ID NO: 4476; a nucleotide sequence comprising at least one, two, three, four, five, six, or seven but no more than ten modifications, e.g., substitutions, insertions, or deletions, relative to SEQ ID NO: 4476; or a nucleotide sequence at least 80%, 85%, 90%, 92%, 95%, 96%, 97%, 98%, or 99% identical to SEQ ID NO: 4476; and
(vii) an ITR, wherein the ITR comprises the nucleotide sequence of SEQ ID NO: 5200; a nucleotide sequence at least 80%, 85%, 90%, 92%, 95%, 96%, 97%, 98%, or 99% identical to SEQ ID NO: 5200; or a nucleotide sequence comprising at least one, two, three, four, five, six, or seven but no more than ten modifications, e.g., substitutions, insertions, or deletions, relative to SEQ ID NO: 5200;
(F) (i) an ITR, wherein the ITR comprises the nucleotide sequence of SEQ ID NO: 5197; a nucleotide sequence at least 80%, 85%, 90%, 92%, 95%, 96%, 97%, 98%, or 99% identical to SEQ ID NO: 5197; or a nucleotide sequence comprising at least one, two, three, four, five, six, or seven but no more than ten modifications, e.g., substitutions, insertions, or deletions, relative to SEQ ID NO: 5197;
(ii) an enhancer, wherein the enhancer comprises the nucleotide sequence of SEQ ID NO: 4471; a nucleotide sequence comprising at least one, two, three, four, five, six, or seven but no more than ten modifications, e.g., substitutions, insertions, or deletions, relative to SEQ ID NO: 4471; or a nucleotide sequence at least 80%, 85%, 90%, 92%, 95%, 96%, 97%, 98%, or 99% identical to SEQ ID NO: 4471;
(iii) a promoter, wherein the promoter comprises the nucleotide sequence of SEQ ID NO: 5199; a nucleotide sequence comprising at least one, two, three, four, five, six, or seven but no more than ten modifications, e.g., substitutions, insertions, or deletions, relative to SEQ ID NO: 5199; or a nucleotide sequence at least 80%, 85%, 90%, 92%, 95%, 96%, 97%, 98%, or 99% identical to SEQ ID NO: 5199;
(iv) an intron, wherein the intro comprises the nucleotide sequence of SEQ ID NO: 4475; a nucleotide sequence comprising at least one, two, three, four, five, six, or seven but no more than ten modifications, e.g., substitutions, insertions, or deletions, relative to SEQ ID NO: 4475; or a nucleotide sequence at least 80%, 80%, 85%, 90%, 92%, 95%, 96%, 97%, 98%, or 99% identical to SEQ ID NO: 4475;
(v) a nucleotide sequence encoding a modulatory polynucleotide, wherein the nucleotide sequence comprises SEQ ID NO: 4393, or nucleotide sequence at least 80%, 85%, 90%, 92%, 95%, 96%, 97%, 98%, or 99% identical thereto;
(vi) a polyA signal sequence, wherein the polyA signal sequence comprises the nucleotide sequence of SEQ ID NO: 4476; a nucleotide sequence comprising at least one, two, three, four, five, six, or seven but no more than ten modifications, e.g., substitutions, insertions, or deletions, relative to SEQ ID NO: 4476; or a nucleotide sequence at least 80%, 85%, 90%, 92%, 95%, 96%, 97%, 98%, or 99% identical to SEQ ID NO: 4476; and
(vii) an ITR, wherein the ITR comprises the nucleotide sequence of SEQ ID NO: 5200; a nucleotide sequence at least 80%, 85%, 90%, 92%, 95%, 96%, 97%, 98%, or 99% identical to SEQ ID NO: 5200; or a nucleotide sequence comprising at least one, two, three, four, five, six, or seven but no more than ten modifications, e.g., substitutions, insertions, or deletions, relative to SEQ ID NO: 5200; or
(G) (i) an ITR, wherein the ITR comprises the nucleotide sequence of SEQ ID NO: 5197; a nucleotide sequence at least 80%, 85%, 90%, 92%, 95%, 96%, 97%, 98%, or 99% identical to SEQ ID NO: 5197; or a nucleotide sequence comprising at least one, two, three, four, five, six, or seven but no more than ten modifications, e.g., substitutions, insertions, or deletions, relative to SEQ ID NO: 5197;
(ii) an enhancer, wherein the enhancer comprises the nucleotide sequence of SEQ ID NO: 4471; a nucleotide sequence comprising at least one, two, three, four, five, six, or seven but no more than ten modifications, e.g., substitutions, insertions, or deletions, relative to SEQ ID NO: 4471; or a nucleotide sequence at least 80%, 85%, 90%, 92%, 95%, 96%, 97%, 98%, or 99% identical to SEQ ID NO: 4471;
(iii) a promoter, wherein the promoter comprises the nucleotide sequence of SEQ ID NO: 5199; a nucleotide sequence comprising at least one, two, three, four, five, six, or seven but no more than ten modifications, e.g., substitutions, insertions, or deletions, relative to SEQ ID NO: 5199; or a nucleotide sequence at least 80%, 85%, 90%, 92%, 95%, 96%, 97%, 98%, or 99% identical to SEQ ID NO: 5199;
(iv) an intron, wherein the intro comprises the nucleotide sequence of SEQ ID NO: 4475; a nucleotide sequence comprising at least one, two, three, four, five, six, or seven but no more than ten modifications, e.g., substitutions, insertions, or deletions, relative to SEQ ID NO: 4475; or a nucleotide sequence at least 80%, 80%, 85%, 90%, 92%, 95%, 96%, 97%, 98%, or 99% identical to SEQ ID NO: 4475;
(v) a nucleotide sequence encoding a modulatory polynucleotide, wherein the nucleotide sequence comprises SEQ ID NO: 4394, or nucleotide sequence at least 80%, 85%, 90%, 92%, 95%, 96%, 97%, 98%, or 99% identical thereto;
(vi) a polyA signal sequence, wherein the polyA signal sequence comprises the nucleotide sequence of SEQ ID NO: 4476; a nucleotide sequence comprising at least one, two, three, four, five, six, or seven but no more than ten modifications, e.g., substitutions, insertions, or deletions, relative to SEQ ID NO: 4476; or a nucleotide sequence at least 80%, 85%, 90%, 92%, 95%, 96%, 97%, 98%, or 99% identical to SEQ ID NO: 4476; and
(vii) an ITR, wherein the ITR comprises the nucleotide sequence of SEQ ID NO: 5200; a nucleotide sequence at least 80%, 85%, 90%, 92%, 95%, 96%, 97%, 98%, or 99% identical to SEQ ID NO: 5200; or a nucleotide sequence comprising at least one, two, three, four, five, six, or seven but no more than ten modifications, e.g., substitutions, insertions, or deletions, relative to SEQ ID NO: 5200.

27. The AAV viral genome of any one of claim 2-8 or 10-26, which comprises the nucleotide sequence of any one of SEQ ID NOs: 5173, 5195, 5196, 5182, 5183, 5184, 5185, 5149-5172, 5174-5181, 5186-5194 or 4439-4468, or a nucleotide sequence at least 70%, 75%, 80%, 85%, 90%, 95%, 99% or 100% identical to any one of SEQ ID NOs: 5173, 5195, 5196, 5182, 5183, 5184, 5185, 5149-5172, 5174-5181, 5186-5194 or 4439-4468.

28. An AAV particle comprising the AAV viral genome of any one of claim 2-8 or 10-27, an AAV viral genome encoding the modulatory polynucleotide of any one of claim 9 or 11-17, or a viral genome encoding the siRNA of any one of claim 1 or 3-8, and an AAV capsid protein.

29. The AAV particle of claim 28, wherein the AAV capsid protein comprises:
(i) an AAV5 capsid protein or a variant thereof, an AAV9 capsid protein or a variant thereof, VOY101 capsid protein or a variant thereof, a PHPeB capsid protein or a variant thereof, a PHP.B capsid protein or a variant thereof, a PHP.N capsid protein or a variant thereof, an AAV1 capsid protein or a variant thereof, an AAV2 capsid protein or a variant thereof, an AAVrh10 capsid protein or a variant thereof, or VOY9P39 capsid protein or a variant thereof;
(ii) an AAV9 capsid protein or a variant thereof;
(iii) an AAV5 capsid protein or variant thereof;
(iv) an amino acid sequence provided in Table 1 or an amino acid sequence at least 85%, 90%, 92%, 95%, 97%, 98%, or 99% identical thereto; or
(v) the nucleotide sequence encoding the AAV capsid protein comprises any one of the nucleotide sequences in Table 1, or a nucleotide sequence at least 85%, 90%, 92%, 95%, 97%, 98%, or 99% identical thereto.

30. A vector comprising the AAV viral genome of any one of claim 2-8 or 10-27, a nucleotide sequence encoding the modulatory polynucleotide of any one of claim 9 or 11-17, or a nucleotide sequence encoding the siRNA of any one of claim 1 or 3-8.

31. A cell comprising the AAV particle of claim 28 or 29, the AAV viral genome of any one of claim 2-8 or 10-27, the modulatory polynucleotide of any one of claim 9 or 11-17, or the siRNA of any one of claim 1 or 3-8, optionally wherein, the cell is:
(a) a mammalian cell or an insect cell;
(b) a cell of a brain region or a spinal cord region (e.g., a CNS cell);
(c) a cell of the cortex, hippocampus, thalamus, or brain stem; or
(d) a neuron, a glial cell, or an oligodendrocyte.

32. A method of making an AAV particle, comprising:
(i) providing a host cell comprising the AAV viral genome of any one of claim 2-8 or 10-27, an AAV viral genome encoding the modulatory polynucleotide of any one of claim 9 or 11-17, or a viral genome encoding the siRNA of any one of claim 1 or 3-8;
(ii) incubating the host cell under conditions suitable to enclose the viral genome in an AAV capsid protein;
thereby making the AAV particle.

33. A pharmaceutical composition comprising the AAV particle of claim 28 or 29, the AAV viral genome of any one of claim 2-8 or 10-27, the modulatory polynucleotide of any one of claim 9 or 11-17, or the siRNA of any one of claim 1 or 3-8, and a pharmaceutically acceptable excipient.

34. A method of delivering an siRNA for inhibiting MAPT expression to a cell, comprising administering to the cell an effective amount of the pharmaceutical composition of claim 33, the AAV particle of claim 28 or 29, the AAV viral genome of any one of claim 2-8 or 10-27, the modulatory polynucleotide of any one of claim 9 or 11-17, or the siRNA of any one of claim 1 or 3-8, thereby delivering the siRNA for inhibiting MAPT expression to the cell.

35. The method of claim 34, wherein the cell is:
(a) a mammalian cell or an insect cell:
(b) a cell of a brain region or a spinal cord region (e.g., a CNS cell);
(c) a cell of the cortex, hippocampus, thalamus, or brain stem;
(d) a neuron, a glial cell, or an oligodendrocyte; and/or
(e) in a subject.

36. The method of claim 35, wherein the subject has or has been diagnosed with having a genetic disorder (e.g., a monogenic disorder or a polygenic disorder); a neurological disorder (e.g., a neurodegenerative disorder); a disorder associated with tau expression, e.g., aberrant tau expression; and/or a tauopathy.

37. A method of treating a subject having or diagnosed with having a genetic disorder (e.g., a monogenic disorder or a polygenic disorder); a neurological disorder (e.g., a neurodegenerative disorder); a disorder associated with tau expression, e.g., aberrant tau expression; and/or a tauopathy, the method comprising administering to the subject an effective amount of the pharmaceutical composition of claim 33, the AAV particle of claim 28 or 29, the AAV viral genome of any one of claim 2-8 or 10-27, the modulatory polynucleotide of any one of claim 9 or 11-17, or the siRNA of any one of claim 1 or 3-8.

38. The method of claim 36 or 37, wherein the genetic disorder, neurological disorder (e.g., neurodegenerative disorder), disorder associated with tau expression (e.g., aberrant tau expression), and/or tauopathy is Alzheimer's disease (AD), Frontotemporal dementia (FTD), frontotemporal dementia and parkinsonism linked to chromosome 17 (FTDP-17), frontotemporal lobar degeneration (FTLD), Dravet syndrome (DS), neurodegenerative disease, traumatic brain injury (TBI), chronic traumatic encephalopathy (CTE), progressive supranuclear palsy (PSP), Down's syndrome, Pick's disease, corticobasal degeneration (CBD), corticobasal syndrome, amyotrophic lateral sclerosis (ALS), Prion diseases, CJD, Multiple system atrophy, mild cognitive impairment, Tangle-only dementia, or Progressive subcortical gliosis.

39. The method of claim 37 or 38, wherein treating comprises prevention of progression of the genetic disorder, neurological disorder (e.g., neurodegenerative disorder), disorder associated with tau expression (e.g., aberrant tau expression), and/or tauopathy in the subject in the subject.

40. The method of any one of claims 37-39, further comprising performing a blood test, an imaging test (e.g., a PET scan or a PET scan in combination with biomarker, e.g., serum biomarker staining), a CNS biopsy sample, or an aqueous cerebral spinal fluid biopsy, optionally wherein the blood test, imaging test, biopsy sample, or aqueous cerebral spinal fluid biopsy is performed prior to, during, or after treatment with the AAV particle, modulatory polynucleotide, siRNA, or pharmaceutical composition.

41. The method of any one of claims 37-4, wherein the pharmaceutical composition, AAV particle, modulatory polynucleotide, and siRNA are administered to the subject:
(i) intravenously, via intra-cisterna magna injection (ICM), intracerebrally, intrathecally, intracerebroventricularly, via intraparenchymal administration, or intramuscularly;
(ii) via focused ultrasound (FUS), e.g., coupled with the intravenous administration of microbubbles (FUS-MB), or MRI-guided FUS coupled with intravenous administration;
(iii) intravenously.

42. The pharmaceutical composition of claim 33, the AAV particle of claim 28 or 29, the AAV viral genome of any one of claim 2-8 or 10-27, the modulatory polynucleotide of any one of claim 9 or 11-17, or the siRNA of any one of claim 1 or 3-8, for use in a method of delivering an siRNA for inhibiting MAPT expression to a cell.

43. The pharmaceutical composition of claim 33, the AAV particle of claim 28 or 29, the AAV viral genome of any one of claim 2-8 or 10-27, the modulatory polynucleotide of any one of claim 9 or 11-17, or the siRNA of any one of claim 1 or 3-8, for use in the manufacture of a medicament.

44. The pharmaceutical composition of claim 33, the AAV particle of claim 28 or 29, the AAV viral genome of any one of claim 2-8 or 10-27, the modulatory polynucleotide of any one of claim 9 or 11-17, or the siRNA of any one of claim 1 or 3-8, for use in the treatment of a genetic disorder, neurological disorder (e.g., neurodegenerative disorder), disorder associated with tau expression (e.g., aberrant tau expression), and/or tauopathy.

45. Use of the pharmaceutical composition of claim 33, the AAV particle of claim 28 or 29, the AAV viral genome of any one of claim 2-8 or 10-27, the modulatory polynucleotide of any one of claim 9 or 11-17, or the siRNA of any one of claim 1 or 3-8, in the manufacture of a medicament for delivering an siRNA for inhibiting MAPT expression to a cell.

46. Use of the pharmaceutical composition of claim 33, the AAV particle of claim 28 or 29, the AAV viral genome of any one of claim 2-8 or 10-27, the modulatory polynucleotide of any one of claim 9 or 11-17, or the siRNA of any one of claim 1 or 3-8, in the manufacture of a medicament.

47. Use of the pharmaceutical composition of claim 33, the AAV particle of claim 28 or 29, the AAV viral genome of any one of claim 2-8 or 10-27, the modulatory polynucleotide of any one of claim 9 or 11-17, or the siRNA of any one of claim 1 or 3-8, in the manufacture of a medicament for treating a genetic disorder, neurological disorder (e.g., neurodegenerative disorder), disorder associated with tau expression (e.g., aberrant tau expression), and/or tauopathy.
